United States Patent Application Publication US 2018/0363030 A1 - sequence listing, part 6

SEQ ID NO: 2 - DNA, 4908759 bp, Enterobacter cloacae (residues 3,272,507-4,908,759 of 4,908,759)
  misc_feature: subsp. cloacae NCTC 9394
  misc_feature (81291)..(81471): n is a, c, g, or t
  misc_feature (113401)..(113844): n is a, c, g, or t
  misc_feature (118699)..(119439): n is a, c, g, or t
  misc_feature (121180)..(121612): n is a, c, g, or t
  misc_feature (150436)..(151186): n is a, c, g, or t
  misc_feature (153134)..(153775): n is a, c, g, or t
  misc_feature (157826)..(158214): n is a, c, g, or t
  misc_feature (177806)..(178122): n is a, c, g, or t
  misc_feature (201064)..(201582): n is a, c, g, or t
  misc_feature (246166)..(246530): n is a, c, g, or t
  misc_feature (254469)..(254836): n is a, c, g, or t
  misc_feature (257644)..(258176): n is a, c, g, or t
  misc_feature (294972)..(295391): n is a, c, g, or t
  misc_feature (305536)..(307543): n is a, c, g, or t
  misc_feature (315963)..(316446): n is a, c, g, or t
  misc_feature (354955)..(355321): n is a, c, g, or t
  misc_feature (382326)..(382728): n is a, c, g, or t
  misc_feature (403136)..(403401): n is a, c, g, or t
  misc_feature (425476)..(426053): n is a, c, g, or t
  misc_feature (521536)..(522085): n is a, c, g, or t
  misc_feature (525870)..(526254): n is a, c, g, or t
  misc_feature (545774)..(546220): n is a, c, g, or t
  misc_feature (568526)..(568708): n is a, c, g, or t
  misc_feature (585535)..(585913): n is a, c, g, or t
  misc_feature (600891)..(602229): n is a, c, g, or t
  misc_feature (608849)..(609190): n is a, c, g, or t
  misc_feature (614614)..(616103): n is a, c, g, or t
  misc_feature (638097)..(638365): n is a, c, g, or t
  misc_feature (650504)..(651137): n is a, c, g, or t
  misc_feature (659571)..(659859): n is a, c, g, or t
  misc_feature (663344)..(663891): n is a, c, g, or t
  misc_feature (679855)..(680656): n is a, c, g, or t
  misc_feature (690110)..(690561): n is a, c, g, or t
  misc_feature (700489)..(700815): n is a, c, g, or t
  misc_feature (709721)..(710055): n is a, c, g, or t
  misc_feature (717718)..(717892): n is a, c, g, or t
  misc_feature (727313)..(727860): n is a, c, g, or t
  misc_feature (738895)..(739366): n is a, c, g, or t
  misc_feature (759081)..(760393): n is a, c, g, or t
  misc_feature (766475)..(766913): n is a, c, g, or t
  misc_feature (775208)..(775516): n is a, c, g, or t
  misc_feature (780559)..(781176): n is a, c, g, or t
  misc_feature (783821)..(784433): n is a, c, g, or t
  misc_feature (789592)..(790187): n is a, c, g, or t
  misc_feature (794556)..(794796): n is a, c, g, or t
  misc_feature (797767)..(798456): n is a, c, g, or t
  misc_feature (801696)..(802084): n is a, c, g, or t
  misc_feature (821162)..(821505): n is a, c, g, or t
  misc_feature (825319)..(825748): n is a, c, g, or t
  misc_feature (833050)..(833551): n is a, c, g, or t
  misc_feature (839004)..(839380): n is a, c, g, or t
  misc_feature (843907)..(844308): n is a, c, g, or t
  misc_feature (849798)..(850081): n is a, c, g, or t
  misc_feature (858249)..(858587): n is a, c, g, or t
  misc_feature (865088)..(865613): n is a, c, g, or t
  misc_feature (884141)..(884564): n is a, c, g, or t
  misc_feature (887788)..(888365): n is a, c, g, or t
  misc_feature (891793)..(892296): n is a, c, g, or t
  misc_feature (895796)..(896325): n is a, c, g, or t
  misc_feature (899291)..(899745): n is a, c, g, or t
  misc_feature (906867)..(907106): n is a, c, g, or t
  misc_feature (912125)..(912645): n is a, c, g, or t
  misc_feature (925674)..(926259): n is a, c, g, or t
  misc_feature (933227)..(933745): n is a, c, g, or t
  misc_feature (948599)..(950142): n is a, c, g, or t
  misc_feature (954819)..(955179): n is a, c, g, or t
  misc_feature (963823)..(964156): n is a, c, g, or t
  misc_feature (967376)..(967936): n is a, c, g, or t
  misc_feature (981422)..(981835): n is a, c, g, or t
  misc_feature (983894)..(985363): n is a, c, g, or t
  misc_feature (992621)..(993194): n is a, c, g, or t
  misc_feature (998086)..(998433): n is a, c, g, or t
  misc_feature (1008268)..(1008525): n is a, c, g, or t
  misc_feature (1014139)..(1015169): n is a, c, g, or t
  misc_feature (1025376)..(1026501): n is a, c, g, or t
  misc_feature (1037731)..(1038162): n is a, c, g, or t
  misc_feature (1044863)..(1045651): n is a, c, g, or t
  misc_feature (1047628)..(1048267): n is a, c, g, or t
  misc_feature (1054625)..(1054963): n is a, c, g, or t
  misc_feature (1058086)..(1058568): n is a, c, g, or t
  misc_feature (1066629)..(1068386): n is a, c, g, or t
  misc_feature (1088591)..(1089084): n is a, c, g, or t
  misc_feature (1090057)..(1091689): n is a, c, g, or t
  misc_feature (1099792)..(1100351): n is a, c, g, or t
  misc_feature (1124993)..(1125609): n is a, c, g, or t
  misc_feature (1128228)..(1128472): n is a, c, g, or t
  misc_feature (1138547)..(1138848): n is a, c, g, or t
  misc_feature (1145759)..(1146188): n is a, c, g, or t
  misc_feature (1153330)..(1153625): n is a, c, g, or t
  misc_feature (1163718)..(1164544): n is a, c, g, or t
  misc_feature (1168101)..(1170371): n is a, c, g, or t
  misc_feature (1177741)..(1178164): n is a, c, g, or t
  misc_feature (1181699)..(1183277): n is a, c, g, or t
  misc_feature (1189023)..(1189979): n is a, c, g, or t
  misc_feature (1191906)..(1192547): n is a, c, g, or t
  misc_feature (1207390)..(1207615): n is a, c, g, or t
  misc_feature (1230663)..(1231057): n is a, c, g, or t
  misc_feature (1234604)..(1236098): n is a, c, g, or t
  misc_feature (1238485)..(1239096): n is a, c, g, or t
  misc_feature (1245463)..(1245885): n is a, c, g, or t
  misc_feature (1248018)..(1248283): n is a, c, g, or t
  misc_feature (1278220)..(1278818): n is a, c, g, or t
  misc_feature (1290444)..(1290778): n is a, c, g, or t
  misc_feature (1294630)..(1294927): n is a, c, g, or t
  misc_feature (1299330)..(1299799): n is a, c, g, or t
  misc_feature (1302504)..(1303186): n is a, c, g, or t
  misc_feature (1309021)..(1309238): n is a, c, g, or t
  misc_feature (1311923)..(1312953): n is a, c, g, or t
  misc_feature (1319241)..(1319589): n is a, c, g, or t
  misc_feature (1324853)..(1325307): n is a, c, g, or t
  misc_feature (1339554)..(1339796): n is a, c, g, or t
  misc_feature (1341866)..(1342377): n is a, c, g, or t
  misc_feature (1350709)..(1351175): n is a, c, g, or t
  misc_feature (1356162)..(1356656): n is a, c, g, or t
  misc_feature (1374235)..(1374568): n is a, c, g, or t
  misc_feature (1387096)..(1387506): n is a, c, g, or t
  misc_feature (1397306)..(1397635): n is a, c, g, or t
  misc_feature (1409284)..(1409757): n is a, c, g, or t
  misc_feature (1412895)..(1413509): n is a, c, g, or t
  misc_feature (1429027)..(1429676): n is a, c, g, or t
  misc_feature (1432723)..(1433175): n is a, c, g, or t
  misc_feature (1441393)..(1442169): n is a, c, g, or t
  misc_feature (1443977)..(1445781): n is a, c, g, or t
  misc_feature (1447218)..(1449049): n is a, c, g, or t
  misc_feature (1450470)..(1451008): n is a, c, g, or t
  misc_feature (1460745)..(1461036): n is a, c, g, or t
  misc_feature (1464265)..(1464519): n is a, c, g, or t
  misc_feature (1489755)..(1491033): n is a, c, g, or t
  misc_feature (1493350)..(1493785): n is a, c, g, or t
  misc_feature (1495985)..(1496816): n is a, c, g, or t
  misc_feature (1499178)..(1499454): n is a, c, g, or t
  misc_feature (1514104)..(1514549): n is a, c, g, or t
  misc_feature (1517482)..(1518356): n is a, c, g, or t
  misc_feature (1523787)..(1524244): n is a, c, g, or t
  misc_feature (1540196)..(1540540): n is a, c, g, or t
  misc_feature (1558802)..(1559078): n is a, c, g, or t
  misc_feature (1570385)..(1570999): n is a, c, g, or t
  misc_feature (1575273)..(1576027): n is a, c, g, or t
  misc_feature (1581871)..(1582173): n is a, c, g, or t
  misc_feature (1591113)..(1591613): n is a, c, g, or t
  misc_feature (1596364)..(1596917): n is a, c, g, or t
  misc_feature (1600270)..(1600599): n is a, c, g, or t
  misc_feature (1602903)..(1603711): n is a, c, g, or t
  misc_feature (1607596)..(1608046): n is a, c, g, or t
  misc_feature (1620537)..(1621025): n is a, c, g, or t
  misc_feature (1630263)..(1631244): n is a, c, g, or t
  misc_feature (1645125)..(1646495): n is a, c, g, or t
  misc_feature (1658810)..(1659245): n is a, c, g, or t
  misc_feature (1661774)..(1662323): n is a, c, g, or t
  misc_feature (1671611)..(1671932): n is a, c, g, or t
  misc_feature (1674755)..(1675241): n is a, c, g, or t
  misc_feature (1684968)..(1685172): n is a, c, g, or t
  misc_feature (1695050)..(1695483): n is a, c, g, or t
  misc_feature (1706970)..(1707413): n is a, c, g, or t
  misc_feature (1711703)..(1711998): n is a, c, g, or t
  misc_feature (1717155)..(1717561): n is a, c, g, or t
  misc_feature (1725832)..(1726271): n is a, c, g, or t
  misc_feature (1732289)..(1733157): n is a, c, g, or t
  misc_feature (1734949)..(1735175): n is a, c, g, or t
  misc_feature (1738092)..(1739249): n is a, c, g, or t
  misc_feature (1764118)..(1764551): n is a, c, g, or t
  misc_feature (1767496)..(1767936): n is a, c, g, or t
  misc_feature (1770729)..(1771057): n is a, c, g, or t
  misc_feature (1774424)..(1774774): n is a, c, g, or t
  misc_feature (1784278)..(1784653): n is a, c, g, or t
  misc_feature (1796858)..(1797148): n is a, c, g, or t
  misc_feature (1813933)..(1814339): n is a, c, g, or t
  misc_feature (1821309)..(1822004): n is a, c, g, or t
  misc_feature (1824737)..(1825053): n is a, c, g, or t
  misc_feature (1828500)..(1828802): n is a, c, g, or t
  misc_feature (1836695)..(1837034): n is a, c, g, or t
  misc_feature (1841563)..(1841769): n is a, c, g, or t
  misc_feature (1848533)..(1848860): n is a, c, g, or t
  misc_feature (1852218)..(1852548): n is a, c, g, or t
  misc_feature (1856666)..(1857235): n is a, c, g, or t
  misc_feature (1873233)..(1874018): n is a, c, g, or t
  misc_feature (1877248)..(1879275): n is a, c, g, or t
  misc_feature (1883455)..(1883948): n is a, c, g, or t
  misc_feature (1899936)..(1900333): n is a, c, g, or t
  misc_feature (1909807)..(1910354): n is a, c, g, or t
  misc_feature (1914506)..(1914882): n is a, c, g, or t
  misc_feature (1966706)..(1967053): n is a, c, g, or t
  misc_feature (1969911)..(1970413): n is a, c, g, or t
  misc_feature (1972445)..(1973201): n is a, c, g, or t
  misc_feature (1986565)..(1986937): n is a, c, g, or t
  misc_feature (1992351)..(1992929): n is a, c, g, or t
  misc_feature (1997326)..(1998035): n is a, c, g, or t
  misc_feature (2001337)..(2002270): n is a, c, g, or t
  misc_feature (2007364)..(2007764): n is a, c, g, or t
  misc_feature (2021973)..(2022265): n is a, c, g, or t
  misc_feature (2028562)..(2029141): n is a, c, g, or t
  misc_feature (2034721)..(2035038): n is a, c, g, or t
  misc_feature (2054966)..(2055192): n is a, c, g, or t
  misc_feature (2069191)..(2069539): n is a, c, g, or t
  misc_feature (2073986)..(2074272): n is a, c, g, or t
  misc_feature (2084746)..(2085107): n is a, c, g, or t
  misc_feature (2090169)..(2090517): n is a, c, g, or t
  misc_feature (2095614)..(2097167): n is a, c, g, or t
  misc_feature (2106615)..(2106974): n is a, c, g, or t
  misc_feature (2114580)..(2114944): n is a, c, g, or t
  misc_feature (2131682)..(2132022): n is a, c, g, or t
  misc_feature (2134789)..(2135327): n is a, c, g, or t
  misc_feature (2138216)..(2138756): n is a, c, g, or t
  misc_feature (2141515)..(2141979): n is a, c, g, or t
  misc_feature (2167201)..(2168494): n is a, c, g, or t
  misc_feature (2175793)..(2176033): n is a, c, g, or t
  misc_feature (2197629)..(2197945): n is a, c, g, or t
  misc_feature (2203977)..(2204394): n is a, c, g, or t
  misc_feature (2208026)..(2209167): n is a, c, g, or t
  misc_feature (2217424)..(2217780): n is a, c, g, or t
  misc_feature (2227089)..(2227560): n is a, c, g, or t
  misc_feature (2249456)..(2250666): n is a, c, g, or t
  misc_feature (2254557)..(2254839): n is a, c, g, or t
  misc_feature (2264519)..(2264976): n is a, c, g, or t
  misc_feature (2274429)..(2274729): n is a, c, g, or t
  misc_feature (2297109)..(2297573): n is a, c, g, or t
  misc_feature (2304217)..(2304694): n is a, c, g, or t
  misc_feature (2308121)..(2308738): n is a, c, g, or t
  misc_feature (2313573)..(2314013): n is a, c, g, or t
  misc_feature (2333815)..(2334108): n is a, c, g, or t
  misc_feature (2340649)..(2341084): n is a, c, g, or t
  misc_feature (2361318)..(2361709): n is a, c, g, or t
  misc_feature (2370124)..(2370552): n is a, c, g, or t
  misc_feature (2397192)..(2397626): n is a, c, g, or t
  misc_feature (2411162)..(2411484): n is a, c, g, or t
  misc_feature (2423375)..(2423767): n is a, c, g, or t
  misc_feature (2431224)..(2431594): n is a, c, g, or t
  misc_feature (2444435)..(2444963): n is a, c, g, or t
  misc_feature (2450673)..(2450950): n is a, c, g, or t
  misc_feature (2460851)..(2461227): n is a, c, g, or t
  misc_feature (2466335)..(2466804): n is a, c, g, or t
  misc_feature (2566683)..(2567604): n is a, c, g, or t
  misc_feature (2576460)..(2576879): n is a, c, g, or t
  misc_feature (2590271)..(2590754): n is a, c, g, or t
  misc_feature (2604244)..(2604726): n is a, c, g, or t
  misc_feature (2617075)..(2617609): n is a, c, g, or t
  misc_feature (2620435)..(2620650): n is a, c, g, or t
  misc_feature (2625363)..(2625935): n is a, c, g, or t
  misc_feature (2628221)..(2628577): n is a, c, g, or t
  misc_feature (2646182)..(2646528): n is a, c, g, or t
  misc_feature (2648612)..(2649110): n is a, c, g, or t
  misc_feature (2662317)..(2662623): n is a, c, g, or t
  misc_feature (2668669)..(2669195): n is a, c, g, or t
  misc_feature (2700194)..(2700425): n is a, c, g, or t
  misc_feature (2703902)..(2704733): n is a, c, g, or t
  misc_feature (2738531)..(2739042): n is a, c, g, or t
  misc_feature (2756448)..(2756732): n is a, c, g, or t
  misc_feature (2776105)..(2778043): n is a, c, g, or t
  misc_feature (2779912)..(2779912): n is a, c, g, or t
  misc_feature (2779931)..(2782016): n is a, c, g, or t
  misc_feature (2784533)..(2786197): n is a, c, g, or t
  misc_feature (2787671)..(2787972): n is a, c, g, or t
  misc_feature (2789019)..(2790466): n is a, c, g, or t
  misc_feature (2792394)..(2793783): n is a, c, g, or t
  misc_feature (2795812)..(2797375): n is a, c, g, or t
  misc_feature (2801023)..(2801964): n is a, c, g, or t
  misc_feature (2802802)..(2804450): n is a, c, g, or t
  misc_feature (2805992)..(2807542): n is a, c, g, or t
  misc_feature (2808864)..(2810592): n is a, c, g, or t
  misc_feature (2812640)..(2814071): n is a, c, g, or t
  misc_feature (2816390)..(2816789): n is a, c, g, or t
  misc_feature (2821739)..(2822419): n is a, c, g, or t
  misc_feature (2853332)..(2853707): n is a, c, g, or t
  misc_feature (2858457)..(2858855): n is a, c, g, or t
  misc_feature (2863937)..(2864172): n is a, c, g, or t
  misc_feature (2876638)..(2877011): n is a, c, g, or t
  misc_feature (2882678)..(2883816): n is a, c, g, or t
  misc_feature (2889568)..(2889886): n is a, c, g, or t
  misc_feature (2906061)..(2906302): n is a, c, g, or t
  misc_feature (2914803)..(2915384): n is a, c, g, or t
  misc_feature (2921051)..(2922462): n is a, c, g, or t
  misc_feature (2929678)..(2930018): n is a, c, g, or t
  misc_feature (2956835)..(2957335): n is a, c, g, or t
  misc_feature (2965986)..(2966507): n is a, c, g, or t
  misc_feature (2978406)..(2978885): n is a, c, g, or t
  misc_feature (2983008)..(2983386): n is a, c, g, or t
  misc_feature (2987086)..(2987770): n is a, c, g, or t
  misc_feature (2992989)..(2993392): n is a, c, g, or t
  misc_feature (3002401)..(3002925): n is a, c, g, or t
  misc_feature (3037465)..(3037740): n is a, c, g, or t
  misc_feature (3049415)..(3049785): n is a, c, g, or t
  misc_feature (3056404)..(3056749): n is a, c, g, or t
  misc_feature (3063521)..(3064048): n is a, c, g, or t
  misc_feature (3078959)..(3079552): n is a, c, g, or t
  misc_feature (3082903)..(3083179): n is a, c, g, or t
  misc_feature (3126402)..(3126808): n is a, c, g, or t
  misc_feature (3145152)..(3145572): n is a, c, g, or t
  misc_feature (3156864)..(3157429): n is a, c, g, or t
  misc_feature (3164539)..(3165004): n is a, c, g, or t
  misc_feature (3170336)..(3171088): n is a, c, g, or t
  misc_feature (3175207)..(3175439): n is a, c, g, or t
  misc_feature (3189455)..(3189866): n is a, c, g, or t
  misc_feature (3197369)..(3197771): n is a, c, g, or t
  misc_feature (3236756)..(3237212): n is a, c, g, or t
  misc_feature (3269441)..(3269655): n is a, c, g, or t
  misc_feature (3281986)..(3282506): n is a, c, g, or t
  misc_feature (3292322)..(3293864): n is a, c, g, or t
  misc_feature (3306700)..(3307078): n is a, c, g, or t
  misc_feature (3311779)..(3312110): n is a, c, g, or t
  misc_feature (3318429)..(3318753): n is a, c, g, or t
  misc_feature (3333055)..(3333269): n is a, c, g, or t
  misc_feature (3347109)..(3348037): n is a, c, g, or t
  misc_feature (3350410)..(3351230): n is a, c, g, or t
  misc_feature (3362763)..(3363120): n is a, c, g, or t
  misc_feature (3372910)..(3373744): n is a, c, g, or t
  misc_feature (3401986)..(3402444): n is a, c, g, or t
  misc_feature (3418421)..(3419227): n is a, c, g, or t
  misc_feature (3422476)..(3423753): n is a, c, g, or t
  misc_feature (3436511)..(3436947): n is a, c, g, or t
  misc_feature (3500844)..(3501083): n is a, c, g, or t
  misc_feature (3506313)..(3506518): n is a, c, g, or t
  misc_feature (3511295)..(3511705): n is a, c, g, or t
  misc_feature (3552717)..(3553206): n is a, c, g, or t
  misc_feature (3571681)..(3572563): n is a, c, g, or t
  misc_feature (3577620)..(3578004): n is a, c, g, or t
  misc_feature (3581987)..(3582349): n is a, c, g, or t
  misc_feature (3588576)..(3588916): n is a, c, g, or t
  misc_feature (3600562)..(3600821): n is a, c, g, or t
  misc_feature (3607129)..(3607444): n is a, c, g, or t
  misc_feature (3612073)..(3612805): n is a, c, g, or t
  misc_feature (3619109)..(3619845): n is a, c, g, or t
  misc_feature (3622855)..(3623785): n is a, c, g, or t
  misc_feature (3629954)..(3630346): n is a, c, g, or t
  misc_feature (3641939)..(3643331): n is a, c, g, or t
  misc_feature (3645119)..(3647479): n is a, c, g, or t
  misc_feature (3666883)..(3668415): n is a, c, g, or t
  misc_feature (3682801)..(3683216): n is a, c, g, or t
  misc_feature (3685244)..(3687056): n is a, c, g, or t
  misc_feature (3691638)..(3692028): n is a, c, g, or t
  misc_feature (3702641)..(3703140): n is a, c, g, or t
  misc_feature (3706667)..(3708621): n is a, c, g, or t
  misc_feature (3720819)..(3721135): n is a, c, g, or t
  misc_feature (3726887)..(3727329): n is a, c, g, or t
  misc_feature (3744688)..(3744954): n is a, c, g, or t
  misc_feature (3752990)..(3753385): n is a, c, g, or t
  misc_feature (3768813)..(3769274): n is a, c, g, or t
  misc_feature (3795795)..(3796062): n is a, c, g, or t
  misc_feature (3803627)..(3803911): n is a, c, g, or t
  misc_feature (3808941)..(3809274): n is a, c, g, or t
  misc_feature (3814740)..(3815277): n is a, c, g, or t
  misc_feature (3825156)..(3825399): n is a, c, g, or t
  misc_feature (3827496)..(3828825): n is a, c, g, or t
  misc_feature (3854715)..(3855918): n is a, c, g, or t
  misc_feature (3874299)..(3874682): n is a, c, g, or t
  misc_feature (3882339)..(3882746): n is a, c, g, or t
  misc_feature (3891853)..(3892170): n is a, c, g, or t
  misc_feature (3898253)..(3898683): n is a, c, g, or t
  misc_feature (3904348)..(3904781): n is a, c, g, or t
  misc_feature (3915032)..(3915332): n is a, c, g, or t
  misc_feature (3932415)..(3932769): n is a, c, g, or t
  misc_feature (3946974)..(3947616): n is a, c, g, or t
  misc_feature (3958257)..(3959674): n is a, c, g, or t
  misc_feature (3966656)..(3967098): n is a, c, g, or t
  misc_feature (3974318)..(3974683): n is a, c, g, or t
  misc_feature (3989468)..(3989915): n is a, c, g, or t
  misc_feature (3996581)..(3997034): n is a, c, g, or t
  misc_feature (4014312)..(4014882): n is a, c, g, or t
  misc_feature (4017278)..(4018830): n is a, c, g, or t
  misc_feature (4022675)..(4024197): n is a, c, g, or t
  misc_feature (4029471)..(4029804): n is a, c, g, or t
  misc_feature (4040673)..(4041132): n is a, c, g, or t
  misc_feature (4053895)..(4054228): n is a, c, g, or t
  misc_feature (4062618)..(4063314): n is a, c, g, or t
  misc_feature (4069191)..(4069663): n is a, c, g, or t
  misc_feature (4077678)..(4077882): n is a, c, g, or t
  misc_feature (4085795)..(4086603): n is a, c, g, or t
  misc_feature (4101225)..(4101828): n is a, c, g, or t
  misc_feature (4108007)..(4108408): n is a, c, g, or t
  misc_feature (4118140)..(4118318): n is a, c, g, or t
  misc_feature (4123764)..(4125001): n is a, c, g, or t
  misc_feature (4129564)..(4130775): n is a, c, g, or t
  misc_feature (4132628)..(4133298): n is a, c, g, or t
  misc_feature (4139071)..(4139982): n is a, c, g, or t
  misc_feature (4144248)..(4144637): n is a, c, g, or t
  misc_feature (4147187)..(4147528): n is a, c, g, or t
  misc_feature (4159358)..(4159741): n is a, c, g, or t
  misc_feature (4168151)..(4168591): n is a, c, g, or t
  misc_feature (4179179)..(4180821): n is a, c, g, or t
  misc_feature (4183892)..(4184400): n is a, c, g, or t
  misc_feature (4187214)..(4187822): n is a, c, g, or t
  misc_feature (4189921)..(4191037): n is a, c, g, or t
  misc_feature (4204252)..(4205079): n is a, c, g, or t
  misc_feature (4216481)..(4216917): n is a, c, g, or t
  misc_feature (4231834)..(4233185): n is a, c, g, or t
  misc_feature (4261821)..(4262200): n is a, c, g, or t
  misc_feature (4279165)..(4279862): n is a, c, g, or t
  misc_feature (4290777)..(4291037): n is a, c, g, or t
  misc_feature (4294843)..(4295910): n is a, c, g, or t
  misc_feature (4298486)..(4299460): n is a, c, g, or t
  misc_feature (4305389)..(4305942): n is a, c, g, or t
  misc_feature (4314086)..(4314624): n is a, c, g, or t
  misc_feature (4335227)..(4335580): n is a, c, g, or t
  misc_feature (4344650)..(4345162): n is a, c, g, or t
  misc_feature (4375458)..(4375811): n is a, c, g, or t
  misc_feature (4379265)..(4379760): n is a, c, g, or t
  misc_feature (4390439)..(4390961): n is a, c, g, or t
  misc_feature (4395737)..(4396002): n is a, c, g, or t
  misc_feature (4428033)..(4428289): n is a, c, g, or t
  misc_feature (4435201)..(4435779): n is a, c, g, or t
  misc_feature (4439201)..(4439573): n is a, c, g, or t
  misc_feature (4458114)..(4458609): n is a, c, g, or t
  misc_feature (4479874)..(4481741): n is a, c, g, or t
  misc_feature (4483889)..(4484409): n is a, c, g, or t
  misc_feature (4496806)..(4497089): n is a, c, g, or t
  misc_feature (4519229)..(4519585): n is a, c, g, or t
  misc_feature (4532326)..(4532623): n is a, c, g, or t
  misc_feature (4538599)..(4539007): n is a, c, g, or t
  misc_feature (4586547)..(4586947): n is a, c, g, or t
  misc_feature (4589921)..(4590672): n is a, c, g, or t
  misc_feature (4598951)..(4599322): n is a, c, g, or t
  misc_feature (4631846)..(4632175): n is a, c, g, or t
  misc_feature (4656260)..(4656619): n is a, c, g, or t
  misc_feature (4673739)..(4675018): n is a, c, g, or t
  misc_feature (4683826)..(4685023): n is a, c, g, or t
  misc_feature (4714181)..(4714460): n is a, c, g, or t
  misc_feature (4747903)..(4748347): n is a, c, g, or t
  misc_feature (4758905)..(4759468): n is a, c, g, or t
  misc_feature (4764378)..(4764953): n is a, c, g, or t
  misc_feature (4767494)..(4769486): n is a, c, g, or t
  misc_feature (4775598)..(4776046): n is a, c, g, or t
  misc_feature (4787731)..(4788004): n is a, c, g, or t
  misc_feature (4793869)..(4794440): n is a, c, g, or t
  misc_feature (4796656)..(4797090): n is a, c, g, or t
  misc_feature (4868442)..(4868766): n is a, c, g, or t
  misc_feature (4872217)..(4873407): n is a, c, g, or t
  misc_feature (4875477)..(4875935): n is a, c, g, or t
  misc_feature (4881433)..(4881992): n is a, c, g, or t
agcggcggcgtgacgttgttggcatgctgacgatagccttcgagcgtcgcctgcttcgcctgcgccatctgcggcgtcacgccacgatcgagcagcgcctgccaggtggaaatcacctgcgcagacaccttttcatccatcgggcccggggagatagctttcatctctgccagctttttactcatgttatccagcgcctgctgagcaggagccaggtccggcgtgccgcccgccgctttgacttccatcgcccggctcaggcgggtgacgaaacggaaatactgatcgttgccctggctcagcaccgtcatttgccggaccagctggcggtcaacatcattaccatcagaaacacgagacagagaccaggtgctgtaaagccccacgcctgcccacatgacacaaaagatccccagtatcgtcagcatgacgaaacggatggtgaaattacgaagcatcttcattgagtattccttgccgtgagggtgaattcgcccagaggcgagtactaccctctttatcggcagataccgcagaaaatatacttttttgttatcgagtcggcatagaatgaaaacgttgtttcgaaaattcaccgacaagaaaggagacatcatgtcctggcacccttacactggccgatacgaaaacatgcagtaccgatactgcggcaaaagcggcctgcgcttaccggcactgtcgctaggcctgtggcacagcttcggtcacgttcagccgctcgattcccagcgcgcgctgctgcgtaaggccttcgatctcggtattacccactttgaccttgccaacaactacggccccccaccaggcagcgctgaagagaattttggccgtctgctgcgggaggattttgccgggtatcgtgacgagctgatcatctccaccaaagcgggctacgacatgtggccagggccgtatggttcgggcggttcacgtaaatacctgctcgccagcctcgaccagagcctgaaacgcatgggtgtggagtatgtggatattttctattctcaccgcgtagacgaaaacacgccgatggaagagaccgccgccgcgctggcacacgcggtgcagagcggaaaagcgctgtacgtcggcatttcgtcctactccacggaacgcacggcggtaatggccgaattgctgcgcgagtggaagatcccgcttttgatccaccagccgtcttacaacctgcttaaccgctgggtcgacaagaccggcctgctggacgcgctggagaaaaacggaacgggctgtatcgcctttaccccgctggcacagggcctgctcaccggaaaatacctgaacggtattccggacggttcacgtatgcaacgcgaagggaaaaaagtgcgcggcctgacggagaaaatgctgacggaagccaacctgagcagccttcgtttgctgaacgagatggcgcacgcgcgcgggcagacgatggcgcagatggcgctaagctggctgttgaaagatgagcgtgtaacgtcggtgctgattggcgcgagccgcccggagcagctggaagagaacgttcaggcgctgaataacctgcgctttagcgaagatgaactgacgcggattgaccagcacgttgcggatggtgagctgaatttgtggcaggcgtcgtcggataaatagtgcagtccgatgctttcgcccctcaccctaaccctctccccagaggggagagggaacatgaacaccctctcccctctggggagagggcagggtgaggggcgtggtggatttatttcttactgatcttatccagataccccatcacaaacgccgacagcacaaacgtcaggtggataatcacataccacatcagcttattatccgggacgtttttcgcgtccataaagacgcgtaacaggtgtatagacgaaatcgccacaatcgacgccgcgactttattcttcagcgatgaggcatccatttttcccagccagttgagcttttctttgtgctcggcgatatcaagctgagagacgaaattctcataaccggagaacatcaccatcaccagtaacccccccaccagcgtcatatccaccagcgacagcagaaccagaatcaaatcggcttctgccacggagaaaatgtttggcaggacgtgaaatatctcctggaagaacttgatcgtcagggcgaccaacgccagggagagaccaaaatagacgggtgcgagcagccagcgagaggcatacattgcgttttcaaagaagcgttccataaaatcctgtctgcaaacgaaaccagcgctcagtatatctcaactatacctcgttgggatccacatccggacgcgcatactccggccagaccagcgcgaccagttccgggtaggcttccaggctaaactcgcgaaaacactggcgcagatttaatacgtctaaatcggagtacgacaccttctcgccattcagacagcgctttttgatattgtcgtaatatttataaaccgccgaattaaggtcgctacaacggcgctgcgcgtcgaacaggccgggcgtatcattaatttcagccattttcattcgcttaattgtcgcatggagaaaatcgatatattcgtgatttacccgccagtaccagaccggcgtcacggcgttcatcaatacggagaaatgatcttccccctcctctttcgacatcaattcaggctgcggcggttcactggcgtcttttgacgctttcgttttatttaacgcttgcatcaataaaagcacgccagcggtcagtaatagtaacgttatgaccgtaaagaaaatgctgttcatgggtaggctccattttttttgattttaaaattgcctcatgttattgtcaacgaatctcaccctttttccacccccaccttttttgaaattaaaggaaattaaaatgctgcccgacaatcttgtcccggcaaagtaccacattacgcctgtggaacagccttcgacggaagcagataaagaggcgaatttcactcaaggaaaaagaaaactctccgactatgaagccgacatattaattggtgtttcacgcaccggcaaatcccgtaatatggtgctggaagagcacgatcgccatttaaaagagcgtttatttcgcgccatcaagattgaagccttagttcatctactaaatgatttacaggccgaaggggaaatagatgcccagacgctaagtcaaataatgaccgagaaaacgcagcaaataaatgaggccggcaatgaaatttggcttaatttaattacgcgtgaaaaaaacaatcccattttttataacctgggggaagattaacgtgaatgatgacagcggtaataacgtttatttgactttggatgataagaaaagcgatgaatttatcttaaagcagaatctcgacgccctgaaaaagataaaaaatgacgagatgacgcgaattacgcaggatttggtttcgattccagccacgctggtgcgcctgaaatggcagaaccgtcgggagatttacgccttgcaagccaaggaggagatttacggcgcggtgatgaacgccattattgagcagcgccctgagcttaaagagaagatcctcgggcgactggaggccaactatcagtacctgctggcacgcgagacagccaccctgcgcctgacccggaaactctcggaaggtcattaccgtacttcaaacgtgacctgtgtagcgcttgatgaagaggcgccgacggcgccttcagtgtgagccaacaatgattgttgcggaatgcaggccgggtaaggcgacgccgccacccggcagggaagacggcaaaagccttcgttttacttcgcggccgctttctcttcgccgaccagaccaatcttcaggtatcccgcctgatgcagcgtgtccattaccttcatcatggtttcataatcgacggttttatccgcgcggaagaagacggtggtgtctttcttgccgccggtcagctggtccagcgccggaataaccgaggcatccgttaccggatcgttgcccaggaacatggacttatcggccttcacggacaggtaaataggcttttccggacgcggctgcggctggctggaggacgcaggcagattcaccttcacgtccaccgtcgccagcggtgcggcaaccataaagataatcagcagaaccagcatgacgtcgataaacggcgtcacgttgatctcatgcatttcaccgttatcgtccagattttcattaagacgcattgccatacaatcaacctacgcgcagtttggacgccgcatgtaccggtttaacggcggcgttcaggtccagatcgcggctttgcagcagcagaacctgcgcggcaacgtcacccagtgtggctttgtaactgccaatcatgcgcgcgaagatgttatagataacaaccgccgggatagcggcaaccagaccgatagccgtggccagcagcgcttctgcgatacccggcgcgacgaccgcaaggttagtggtctgcgtctgggcgataccgataaagctgttcatgatgccccagacggtaccgaacaggccgacgaacggggagatggcgccgatagtcgccaggtagccgttaccgcggcccatatgacgacccacggccgcaacgcgacgctccagacggaagccggtacgctctttaatgccttcgttatcttcactgcctgcggagagttccagctcgttctgcgcttcgttcactaacagggtagtcaggcttttcgcatggaaggatgaggtgatatcagaagcctgatccagagagcgggcttccgccagctgcttctgctcacgcttgaggcggcgtttttgtgaaagaagttcggcgctcttgctgaagaagatagcccaggtgatcacggacgccagaatcaggccgatcatcacaatcttaactacgatgtcagcatgttgatacatgccccaaacggagagatccgtctgcatcaaattattacccactctgtatctccaggacgcaaatcacaaaatctgaacgtaataatatcaaaacgtcgtcgaattgatagtagttctcattagtatttacatagtgccgtaattttcgctcactttccttgcgcttacgcagtaaaaatttcttatgcgaatttttgataatattttctgcttattcgataagcatccggatgcacattctgacaatcgtggtagtctggacgtccagacgtataaaaatagggttagcgaacatgactaaaaagcagcttgagaccacgctggtgcaggcaggacgcagtaaaaaatacacgcagggctcggtcaacagcgtgatccagcgcgcctcctcgctggtgtttgataccgttgaagataaaaaaatcgctacgcgtaatcgcgcgaagggcgggctgttttacggtcgtcgtggcacgttaacccatttctcgttgcaggaagccatgtgcgaactggagggcggcgcgggctgcgcgctgttcccgtgcggcgcggcggcggtcgccaataccattctggcgtttgtggaacagggtgaccacgtcctgatgaccaataccgcctacgagccaagccaggacttctgcaccaaaatactcagcaagctcggcgtcaccaccagctggttcgatccgctgattggggccggtattgccgcgcttattcagcccaacacgcgcgttgtgttcctggaatctcccggctccatcaccatggaagtgcatgacgtcccggccatcgtgaaggcggtgcgcagcatagcgccggaagcgatcatcatgatcgacaacacctgggcggcaggtgtgctgtttaaagccctggaatttgacatcgatatctccattcaggcggcgaccaaatacctgattggccattccgacggcatgatcggtacggcggtgtctaacgcccgctgctgggatcaattgcgtgaaaacgcctacctgatgggccagatggtggatgccgataccgcctacatgaccagccggggcatccgtacgctcggtgtgcgtttgcgtcagcatcacgaaagcagcctgcaaattgcacagtggctggcgctgcatccgcaggtggagcgcgttaaccatccggcgctgccgggcagcaagggccacgaatactggcaacgtgactttacgggtagcagcgggttgttctcatttgttcttaaaaagcgcctgaatgacgccgaactggcaagctatctggataactttaccctcttcagcatggcctattcatggggtgggtttgaatcgctgatcctgcccaaccagccggagcagattgcggccctgcgcccgggcggcgaggtggacttcgaggggaccttaatccgcctgcatattgggctggaaaatgtggacgatttaattgcggatttatcggcaggatttgagcgcatcgtgtaaagtgctggctgaaatgtactccccggacgctattctgaacaccgcaagcagaaaagtctgtatgagatgcgcctgcgatcaaccccgacaggcaaaattgggagtacaatagcgttatatctgctgttccacaggaaagtccatggctgttattcaaaatatcatcacggcgctctggcaacacgattttgccgcgctggcggatccgcatgtcgtcgggattgtctatttcgtgatgttcgcgacgctgtttctggaaaatggattactgccagcctcatttttacccggtgacagcctcctcttgctcgcaggggcgttaatcggcaagggcgtgatggacttcgcaccgacaatggtgatcctcacctctgcggccagtctcggctgttggctgagctacctgcaagggcgctggcttggaaacactcgcgtggtgaaaggctggctggcgcagctgccgcataaatatcaccagcgcgcgacctgcatgtttgaccgtcacggcctgctggcgttacttgccgggcgttttctggcgtttgttcgtaccctgttgcctaccatggcgggtatttcaggcctctctaaccgccgcttccagttcttcaactggctgagcgccctgctctgggtaggcgtggtcaccacgctcggctacgcgctgaatatgatcccctttgttaagcgccatgaagaccaggtgatgaccttcctgatgatcctgccgattttcctgctggttgcagggctggtgggtaccattgcggtggtgattaagaaaaagtattgcagcgcataaataaaagccgggtggcgctaccgcttacccggcctccgtttcccctcaggctccctgcattgttcttatacgtgacgcatcttcccccggcgtgacgccgaagtagcgcttaaactcccgactaaactgcgacgcgctttcatacccgacccgcatcgccgcggcgctggccttcatgccatcgtggatcatcagcatccgcgccttatgcagacggtaggttttgaggtactgcaacggcgacgtgctggtgacggatttaaagttatggtgaaacgccgagacgctcatattggcttccgccgccagctggtcaacgctgaggttttccgtgtactggctctcgatgcgcttcagcacgcggctaatcaggctgaagtgcgtttgccggcttaccagcgccagcagcgccccgccgcccggtcccagcagcacatggtaaagaatttcgcggataatctgttttccgagaatacgcgcatccagcggcctttccatcacgtctaacaggcgttcaatcgcgcagagaatttcctccgacagggtcgcggagttgataccgcttgccgccattgacggccggaaaagttcgtcctccccaatctccatcagcagctcctgcaactggaggatgtcgacgttgacgcggatcccggccagcggtacctcctctgtcgcgaaagtttcacattcgaagggtaaaggtactgtcagaagcagatattcattggtgtcgtaacggaacacgcgctcattgatatagccaatcttatggccagaaaagagaaacacgatgccgggctgatacatcaccggggtgcgcgtcccgggctgggtaccgtacagcaatcggatatccggcaacagctcaaccgaatcatttccgttatctatcagtcttttaatctgcgacgttagctggcggcagatggcatcacggttcattttcagttactccgggtacggtttccgacgctgacagtgtgcgcattttcttaccgtttctccagcgcgctgtagaaatgggcaagacatcggcaggaatgtgcattgagaggatagcgcctgcccgccacaatgagcagcatcaggttgccttctgcgccaccacgattttttacccactacagggaacaagccatgaacaactttaatcttcataccccaacccgcattctgtttggtaaagacgccatcgccgacctgcgcgcgcaaatccccgctgacgcccgcgtgctgatcacctacggtggcggcagcgtgaaaaaaaccggcgtgctggatcaggtttacagcgccctggacggactgaacgtgcgcgagttcggcggtatcgagcctaacccgtcttatgaaacgctgatgaacgcggtgaaaatcgcccgtgatgagcgaatcaccttcctgctggcggtgggcggcggctccgtgctggacggcaccaaattcatcgcggcggcggcccattacgctgacgacatcgacccgtggcatattctggaaacgggcggcagcgacatcagcagtgcgatcccgatgggctccgtgctgacgctgccggccaccggatcagagtccaacaaaggcgcggtcatctcccgtaaaaccaccggtgacaagcaggcctttatgaacgaacacgttcagcccgtgttcgcgatcctcgatccggtttacacctataccctgcctgcgcgtcaggtggcgaacggcgtggtcgacgcctttgttcacaccgttgagcagtacgttacttacccggtaaacgccaaaattcaggatcgtttcgcggaaggcattctgctgacgctgattgaagaaggtccaaaagcgctgaaagagcctgaaaattacgacgtgcgtgccaacgtgatgtgggctgccacccaggcgctgaacggcctgatcggcgcaggcgtgccgcaggactgggctacccatatgctcggccacgagctgacggcgatgcacggcctggatcacgcccagacgctggcggtggttctgcctgcgctgtggaacgaaaaacgtgacgctaaacgcgccaaactgctccagtacgccgaacgcgtgtggaacatcaccgacggttccgacgatgcgcgtatcgatgccgcgattgaagccacccgtcacttctttgaaagcctgggcgtgccaacgcgtctctctggctacggcctggacggcagctccatccctgccctgctggcgaaactggaagcacacggtatgacgcagatcggcgagcatggcgacatcannnnnnnnnnnnnnnnnnnnnnnnnnnnnnnnnnnnnnnnnnnnnnnnnnnnnnnnnnnnnnnnnnnnnnnnnnnnnnnnnnnnnnnnnnnnnnnnnnnnnnnnnnnnnnnnnnnnnnnnnnnnnnnnnnnnnnnnnnnnnnnnnnnnnnnnnnnnnnnnnnnnnnnnnnnnnnnnnnnnnnnnnnnnnnnnnnnnnnnnnnnnnnnnnnnnnnnnnnnnnnnnnnnnnnnnnnnnnnnnnnnnnnnnnnnnnnnnnnnnnnnnnnnnnnnnnnnnnnnnnnnnnnnnnnnnnnnnnnnnnnnnnnnnnnnnnnnnnnnnnnnnnnnnnnnnnnnnnnnnnnnnnnnnnnnnnnnnnnnnnnnnnnnnnnnnnnnnnnnnnnnnnnnnnnnnnnnnnnnnnnnnnnnnnnnnnnnnnnnnnnnnnnnnnnnnnnnnnnnnnnnnnnnnnnnnnnnnnnnnnnnnnnnnnnnnnnnnnnnnnnnnnnnnnnnnnnnnnnnnnnnnnnnnnnnnnnnnnnnnnactttcgttttttgacatttcgtccagacttaatgcacatcacatcgtcggaggttccctccggcgatgagcacctgaaggaggaaaaatggcaaaccaaaccgtaatcaagctacaggacggcaacgtgatgccccagctggggctaggtgtatggaaagccggtaacgacgaggtcgtctccgccattcataaagcccttgaagtcggctatcggtccatcgataccgccgccgcctataaaaacgaggacggcgtgggaaaagcgcttgccagcgccggcgttccccgggatgagcttttcatcaccaccaagctgtggaacgacgatcaaaagcgtccccgcgaagcgttgcaggagagtctggagaaactccagctcgatttcgtcgatctttatctcatgcactggccggtaccggctatcgaccattacgttgatgcctggaaagggatgattgaactgcaaaaagaggggctgataaaaagcatcggcgtctgtaatttccaggttcatcatctgcaacgcctgattgatgaaacgggcgtcgcgccggtgattaaccagattgagctgcatccgctgatgcagcagcgccagcttcattcatggaacgccacgcacaagatccagaccgaatcctggagcccgctggcccagggcggcgaaggggtgtttgaccagaaaatcatccgtgaactggcggataagtacggtaaaaccccggcgcagatcgtcattcgctggcatctggatagcggtctggtggtgatcccgaaatcggtcacgccatcgcgtatcgccgagaacttcgacgtctgggatttccgcctggataaagacgagctgggtgaaattgcgaagctggatcagggcaagcggcttgggccggacccggatcagtttggcgggtgatcccctcaacctgccctctccccggaggggagagggttagacctgtaggcccggtaagcgcagcgccaccgggcattgttacaggtttaaccggtcttacgttttacgttcttcttcgttcccgcaacaccgttcgaacgctgatgcgcaataggcgtgtgcttggtcagcgccgggcgcgtgttgcggttctggcggcgcgcttcgcgcatctcttccagcgttggcgctggcaccaggcaatcacgacgcgagccgatcaggtgctttttccccatctcttccagcgcctgacggatcagcggccagttcttcggatcgtgataacgcagcagcgctttatgcagacggcgctgtttatcccctttcggcaccaccacgtcttcgctcttataaccaatcttactcagcgggtttttgccggtgtaatacatggtcgtcgagttggcgagcggcgacggatagaagttctgcacctgatccagacggaatcgacgctgcttcagccacagcgccaggttcaccatgtcttcatcacgggtgccggggtgtgcggagatgaaatatgggatcagatactgctcttttcccgcctgttttgaataggtatcaaacagctgtttaaagcggtcatagctgcccatgcccggcttcatcattttggacagcgggccttcttcggtgtgctccggggcgatcttcagataaccgccaacgtggtgcgtcgccagctctttgatgtagcgcggatcttccaccgcaatgtcgtaacgcacgccggaggcgatcaggatcttcttgatgcctttcaggtcacgggcgcgacggtaaagattgatagtcggctcgtggttggtgtccatatgctcgcaaatgctcggatagacgcaggagagacgacggcaggtctgctcggcgcgcggcgatttacagcgcagcatgtacatgttggccgttgggccacccagatcggagatcacgccggtaaagcccggcaccgtgtcgcgaatcgcttcgatctcgttaacaatcgactcttcggaacggctctgaataatacggccttcgtgttcggtgatcgaacagaatgagcacccgccgaagcagccgcgcatgatgttgattgagaaacggatcatctcgtacgccggaatacggctgttgccatatgacggatgcggcacacgcttgtacggcagagcaaagacgctgtccatctcttcggtagagagcgggatcgccggtgggttaacccagacatagcgctcgccgtgcttttgcatcagagcgcgcgcgcagccggggttggtttcatggtgtaagatgcgcgacgcgtgggcgtaaagtactttatcgctttttactttttcgtaagacggcagcagcacataggttttttcccacggcttcggacgcggcggctgcaccaccacggcctttgcttccgctttcttcggctcaaccggtttgttatccgcgcacggcagatcgtcaccgtacggatgtgggatagggtcgattttgcccggcatatcgataatgcgggaatccaccccgctccagcccggcagcgcctctttcaccatgatcgcggtgttgcgcacgtcgcggatctcgctgaccggttcaccctgcgccaggcgatgcgccacttccaccagcggacgctcgccgttgccaaagatcagcatgtcggctttcgaatccaccagcaccgaacggcgcacggtatcagaccagtagtcgtagtgtgcggtgcggcgcaggctcgcctcgatgccgcccaggatcaccggcacgtctttccatgcttctttgcatcgctgggtgtagacgagggtcgcgcgatcgggacgtttacccgccacgttgtcagccgtgtaagcgtcgtcatggcgcagcttacggtcggcagtatagcggttgatcatcgagtccatgttgcccgcggtcacgccgaagaacaggttaggcttgcccagacgcataaagtcgtctttgctgttccagtcaggctgggagatgatccccacgcggaagccctgggcttcaagcatacggccacagatcgccatgccaaagctcgggtgatcgacatacgcatcgcccgtcaccagaatgatatcgcagctgtcccagcccagttgatccatctcttcccgggacatcggcaggaacggcgccggtccaaagcaggctgcccagtactggggccaggagaagaggtcgcgatccggctggatcagggaaatagcgctcataatgcttccgaagaaaaaatagacaaaaggagcgggattatacgctggtttaccgggggaaatgaaggggtatttattgcccggtgacgctacgcttaccgggcctacgggcctgtaggtcgggtaaggcgaagccgccacccgactcgttttacggtgccggattcaccagcatctgccctaccgatcccctgtccatcatctccagcgtctggctgtggaacaggaacgggaagtgcggccaggaaggctggccgtagtagacgagcagttcgacctggccatccacccagacggtatctttccagcccctgtcttccgggaacggcatcgccccgttgacgttgcggatcaggaatgacaccccttcaatatggaacgactgcggcatctccgagcggacggtccagcgctcccaggttccctgctgggcggtgatatcaatgcggtttacgtcccacagcgcaccgttgatgcccggatcgtcgccaaggctgatatcgcgactgcgtactgccgggccggtcacaatctcctgcggcagcaggcgcatcggcagactgtcggtcaccagcggcaacaggccggtcgggcgcagcgtcagcaccagcgtggagaccagaacgctcgacggttcaaagaagccacgaatacggtcaacaatgcttgccgcttcgccgcaggtcacggacacttcatccccgttggtcatatccacgaggatctcacgacgttcgcccggtgcgagcgccagctgttttaccgacaccggcgcaggtaataacccctgatcgcctgaaatcacgtgcagcgcgcggccgtcgctcatctgcaactggtagcggcgcgagttagaggcattcagcagacgcaggcgcacccagccacgagacacttcaacatacgggctttgcgcgccgttaaccagcagcgtatcgccgacaaaaccaccgctgcccggctcgctgtactccggcgtgccgaagttatccagccgcttgtcctgaataatgatcgggaaatcatcaacgccgtagtgattcgggatcggcagcgttttgctgacctcatcttcaatcagccacattccggccaggccgttgtagacctgctgggcggtgcggttcggggtgttggcgtgataccacaatgtcgccgcgctctgacgaatcgggaggacgggcgcccagtcggcattcggcgacatcatgcgtgccgcgccgccaatcagcggccccggcacctgcaaaccactgacggtcatcgcgacattttccgtcgtacggttactgtagatgagcttaacgtcatcgccattccacacgcgaatggtcggcccgaggtagcgtccgttaatgccccatacctgcgcgcgcgttccctgggtaaaggaccagtggctacgctgaagcgtgaggaatagcggctgcccgcgacgggattcaatcaacggcggaataggcagcggctgttgctgcccggcggcgctggctgtccgcggcatcgcacccgcacaaagggcgatacccgaagcctgaataaactgacgccgactgagtgacatataagctccatctgaaacgactaacaacgcgggaattcgttttcccttacacgacaccgggtcaaatcttaccggcggcttctcgctctgcaacttctttatcgagctgcgcaatatgctgagccatcagctcgcggcagtgcgtggccagctcgcgcacctggtctttaccgtattttgaggtatctaccggcggcagcatttcgacaatgaccagtccgttattcagacggttaagattaatcttattcgatgtattggaaacacacacgggaataattggaacgcctgccgcaattgcagcatgaaacgcgccggtcttaaacggcagcaggccacgaccacggctgcgcgtcccttccgggaacatccagatggaaatccggcgctttttaaactgatccaccacttccgcaatggtgccatgcgctttggcgcggttgttacggtcaatcagtaagttaccggtgagccagtacagctgaccgaaaaacgggatccacagcaggctttttttacccacggttacggtcggcggaagaacaatatttgaggccgtcaccatatcgtagttattctgatggttagcgatatagatggcgttaccgaaattctccgccccttcaggcagacgcttttcaaccttcaggccaaacagcggcgcaagacgaccaaacatgtggccaaacgtcgcgacatgctttgggttacgcgggctgaacaggcaataaatcgatccgaaaatacagaccagaatgcaataaataacggtaagaatgagacgaacaatgtatagcatagcgacctctgaagccctgacagctgacaattatacttcacctgtggccaggtaaggactttattacgagcgcgtattgttaatcgcaacgcacgaattaacaacgtttttacgggaaattttatggtaattccccctccggaaagaggggggatgaaacaggttactcttcgctgtcgtccgctttgctgcgcgccggcgagtcgatctccacgcggtcaattcgctggaggccgcgcatcagtgagccgcgacgtccacgctcacccaccaccttctgcaactcttccggacgcagtttgattttacgcttgccgacatgaatggtcagggtgctctgcggcggcagcaggaagagatgcgcgaggccatcgacgccttttgccgcttccgctgacgggatactgatgatcttgttgcccttccctttcgacagctccggcagatcgctgaccgggaacatcagcatgcgtccggcagcggtgatcgccagcagcatgtcgctttcgttctcgatgatcagcggcggcatgacgtgtgcgttatccggcaggctaatcagcgccttaccagcacggttacgcgacaccagatcgttgaaggtacagataaagccgtagcccgcatcagacgccatcagcagtttttgatcgtcggcctccatcagcatatggtccaccgtggcgcccggcggcagcgtcagcttgccagttagcggttcgccctggccgcgcgcagacggcagcgtgatcgggtcgatggcgtagctgcggcccgtggagtcgatgaacgccaccggctggttactcttgcccttcaccgccgccttgaagctgtcaccggatttgtagctcagacccggcgcgtcgatatcgtggcctttggcgctacgtacccagccgctctgggaaagcacgatggtcaccggctcggaaggcagcatgtcgtgctcgttcatcgccttcgcctcttcgcgctcgtgcagcggagaacgacggtcgtcgccaaaggcgtcggcatcggcctgcaactctttcttcagcagggtgttcatcttgcgctcggatgccagaatcgcctgaagctgatcgcgctctttttccagctcgttctgctcgccgcggatcttcatctcttccagtctggcgagatggcgcaatttcagttcgaggatcgcttcggcctgggtttcgctgatgccaaagcgcgacatcagggcaggcttaggttcgtcctcggtacgaatgatctcgatcacttcgtcaatgttgaggaacgccaccagcaaaccttcgaggatatgcaggcgcttaagcactttttccagacgatggttcagacgacggcgcaccgtatcgcggcggaaggccagccattcggtgaggatctccagcaggtttttcaccgccggacgaccgtccagaccaatcatgttcaggttgatgcggtagcttttttccagatcggtagtggcgaacaggtggttcatcacctgctccatgtccacgcggttagagcgcggcacgatcaccagacgggtcgggttttcgtggtccgattcgtcgcgcaggtcgtccaccatcggcagctttttattgcgcatctgggaggcgatctgctccagcaccttcgcaccggacacctggtgcggcagcgcggtgatcaccacagccccgtcttctttggtccacaccgcgcgcatgcgcacggagccgcgaccgttctggtagattttgcggatttccgcgcgcgaggtgatgatctcggcttcggtcgggtagtccggcccctgcacgatatccagcagatcgtccagcgaggttttcggctgctcaatcagggtgatggcggcttttgccacttcacgcaggttgtgcggcggaatgtccgtcgccatgcccacggcgataccggtcgtgccgttcagcaggatgttcggcagacgcgcaggcagcatcttcggctcctgcatcgtaccgtcgaagtttggcacccagtcgaccgtcccctggcccagctcgcccagcagcacttcggcgtatttggacaggcgggattcggtataacgcattgccgcgaaggatttcggatcgtccggcgccccccagttcccctggccatccaccagcggatagcgataagagaacggctgggccatcagcaccatcgcttcatagcaggcgctgtcgccgtgcggatggtatttacccagcacgtcgccgacggtacgggcggatttcttaaacttggcggtagcattcagccccagttcggacatcgcatagacgatgcggcgctgaacgggcttcaggccatccccgataaacggcaacgccctgtccatgatgacgtacatggagtagttcaggtaggcgttttccgtgaattcatgtagcgcgaggcgctctgccatatcgctcattacgtgtgattcctcaactcagaaaccgatgggtttcaggcaatattgccgcagatactaccttatctgacgagttgagtcacaaagaaaaagggccgggtgagggtgtgagaccccgctgttatcggcacgttttattgctctctaattaaataagctttccattaacacgtcattatttttcagtgataaccatttactgtgataaatagcagattaattatttcaacaagccactacatttgttgctggaaaaaattacgctcaaggaaaagagatgagccctattatttatttaacccttgagggcaatattcagggacagatttccgctggctgtgggtcagtggcctctatcggcaatctctaccagctggggcacgaggacgagattcaggtgttgagcctgaagcagacagcgcgcgactcacggggctgcacgagccatcacagtctggatttttgcaaacgcctggataaaagctcgccgctgcttagcaacgccattaataataatgaataccttaaacttacgtttgatatctatcgcataaataaatttggccggctggagaggttttatcttatcgaacttcgcggcgctacgctgcaatccatccatcagacgtttacggccaatcatccagactatgaatatatatcggtgcgctacgattatattctttgccgtcatctgatcgcccaaaccgaattcgattacctgctcacgccggacaatttcaaccgtctttttccggtcgtgcagaaaacgctgctttcaccggagccaccgccgcgtaaggtgacgctggtactgggcgtatttttcgacggcacgggcaacaacgctgtgaacacgcaaaacatgttaaagaccctcacggcgcagcactatgatattgataactccgacgctgaaagcatacttgccagaaatacgtcagagaaaatggggatcagcggcataggggcgggcagctaccttggatactatacgaatattcattggttgaacgaattatacgagcaaaaattctcaccagatggcagatacattcaaggtgcgatttatatcgaaggaatcggcactcgggcaggcgaacccgatgacccgattgggctggggctaggcaccgcagaaacggggattattgccaaaacggacgacgcggtggcgcagctggctaaaacgatagatgccaccttagcttcactgaaggggaggtttgtcgtcgataatctgctgtttgatatcttcggtttcagcaggggcgcagcggcggcccggcactttgcaaaccgtgttcagacaaacgatcacagcattcaggatgccataacgacaggtatgcgaaaatttacctatcgcggcacgccgaccggtaacacccgctttctcggcattatggacaccgtagccgcagtcggcacggtggcgaacggcctcaacccgcatagcgccgatacgggcagcgtcaatatcgcactgcatcccggcgtcgcgcagaaggtgtttcacatcaccgccggacacgaatgccgctataactttgccctcaacagcgtcgcccccgcctggccggaactggaacttcccggcgcccattctgatatcggcggcggttatctgccacagcttcgcgaggatctctaccttacccgccctcaggttgaaacgctgcccctaagcaaacccggaacagcgtcccgcgtctaccagcaggccctggcgcagctcgaggagctggcgcacacgccggccattatgtccatcactcattctcataccttctctcccgaagtctgggaggacgattatgcgcctgccgatcgctacagccagccgcagaaacnnnnnnnnnnnnnnnnnnnnnnnnnnnnnnnnnnnnnnnnnnnnnnnnnnnnnnnnnnnnnnnnnnnnnnnnnnnnnnnnnnnnnnnnnnnnnnnnnnnnnnnnnnnnnnnnnnnnnnnnnnnnnnnnnnnnnnnnnnnnnnnnnnnnnnnnnnnnnnnnnnnnnnnnnnnnnnnnnnnnnnnnnnnnnnnnnnnnnnnnnnnnnnnnnnnnnnnnnnnnnnnnnnnnnnnnnnnnnnnnnnnnnnnnnnnnnnnnnnnnnnnnnnnnnnnnnnnnnnnnnnnnnnnnnnnnnnnnnnnnnnnnnnnnnnnnnnnnnnnnnnnnnnnnnnnnnnnnnnnnnnnnnnnnnnnnnnnnnnnnnnnnnnnnnnnnnnnnnnnnnnnnnnnnnnnnnnnnnnnnnnnnnnnnnnnnnnnnnnnnnnnnnnnnnnnnnnnnnnnnnnnnnnnnnnnnnnnnnnnnnnnnnnnnnnnnnnnnnnnnnnnnnnnnnnnnnnnnnnnnnnnnnnnnnnnnnnnnnnnnnnnnnnnnnnnnnnnnnnnnnnnnnnnnnnnnnnnnnnnnnnnnnnnnnnnnnnnnnnnnnnnnnnnnnnnnnnnnnnnnnnnnnnnnnnnnnnnnnnnnnnnnnnnnnnnnnnnnnnnnnnnnnnnnnnnnnnnnnnnnnnnnnnnnnnnnnnnnnnnnnnnnnnnnnnnnnnnnnnnnnnnnnnnnnnnnnnnnnnnnnnnnnnnnnnnnnnnnnnnnnnnnnnnnnnnnnnnnnnnnnnnnnnnnnnnnnnnnnnnnnnnnnnnnnnnnnnnnnnnnnnnnnnnnnnnnnnnnnnnnnnnnnnnnnnnnnnnnnnnnnnnnnnnnnnnnnnnnnnnnnnnnnnnnnnnnnnnnnnnnnnnnnnnnnnnnnnnnnnnnnnnnnnnnnnnnnnnnnnnnnnnnnnnnnnnnnnnnnnnnnnnnnnnnnnnnnnnnnnnnnnnnnnnnnnnnnnnnnnnnnnnnnnnnnnnnnnnnnnnnnnnnnnnnnnnnnnnnnnnnnnnnnnnnnnnnnnnnnnnnnnnnnnnnnnnnnnnnnnnnnnnnnnnnnnnnnnnnnnnnnnnnnnnnnnnnnnnnnnnnnnnnnnnnnnnnnnnnnnnnnnnnnnnnnnnnnnnnnnnnnnnnnnnnnnnnnnnnnnnnnnnnnnnnnnnnnnnnnnnnnnnnnnnnnnnnnnnnnnnnnnnnnnnnnnnnnnnnnnnnnnnnnnnnnnnnnnnnnnnnnnnnnnnnnnnnnnnnnnnnnnnnnnnnnnnnnnnnnnnnnnnnnnnnnnnnnnnnnnnnnnnnnnnnnnnnnnnnnnnnnnnnnnnnnnnnnnnnnnnnnnnnnnnnnnnnnnnnnnnnnnnnnnnnnnnnnnnnnnnnnnnnnnnnnnnnnnnnnnnnnnnnnnnnnnnnnnnnnnnnnnnnnnnnnnnnnnnnnnnnnnnnnnnnnnnnnnnnnnnnnnnnnnnnnnnnnnnnnnnnnnnnnnnnnnnnnnnnnnnnnnnnnnnnnnnnnnnnnnnnnnnnnnnnnnnnnnnnnnnnnnncacataaaaaatgccgttcgttgacagagcggcatttttttcacgtcaatcaggcattatttgttcagcttgataacctgcttcacgtcgatttcaaactcgttccagtctttatcgattttaccctggagttcgactttatcctggggcgtcaccgtcacgccgttccagcgcttgtggtcgatctccaccactaccgtgccgctttcatcgcggaaggtgtaacggtcatcggacaggcgctcggtaatgttcccgcgcagcttcacccaggcatcatccttcaggtctttcactttagccgcggtggtgaggttggcgttgttatcgacaaagccaccctgctgggtttgcgtctggttctgtgtcgcagatgggccagagaagccaccctgtgcagcaaagacaggggccgtggtcatcatcatgatggcagcaattgcagcgaattttttcatctttatctctccctttaatgtcgtttcacaatccattaaacagggtaaaccttaacaacttcttaaggggaaaatttatttatttttactgtacagcaggcgcttgcagaaggtttactgacggcatcaaggaggaaatatgcgcattttactggtagaagacgacaggctcatcggcgacggcatcaaagcgggcttaagcaaaatgggctttaacgtggactggtttaccgacggtaaaaccgggcaggcggccctgtacaccgcgccgtatgatgccgtggtgctggacctgacgctgccagaaatcgacgggcttgagatcctgcgcgcctggcgcgaaagcggtaagagcgaaccggtgctgatcctgaccgcgcgggatgcgctgaatcagcgcgtcgaagggttacgcctgggggcggatgattacctgtgtaagccgttcgcgctgattgaagtggcggcccgccttgaagcgctggtgcgccgcagccacgggcaggcgcgcagcgagctgcgtcacggcaaggtcatgctcgatccggcaagccttgtcgccacgctggagggcgaaacgctggtgctcaaacccaaagagttcgccctgctggagctgctgatgcgcaacgcgggccgcgtgctgccgcgcaaggccatcgaggagaaactctacaactgggatgatgacgtctccagcaacgccgtcgaagtccacgttcatcatttacgccgcaagctcggcagcgaatttatccgcaccgtgcacggcatcggttataccctgggtgacgcatgaaactgacccaacgcctgagcctgaagctgcgcctgacgctcctctttttgctgctgtccctggcggcctggtttgccgcaagcgtggtggcctggcaccagacgaccgacaagctcgataagctgttcgatacccagcagatgctgtttgccaaacggctgctgacgatggacgtggacgaactccgcgccccggaacgcatgcgcgaggtaccgaaaaaagccaaacacggccatctggacgacgatgcgctggccttcgcaatcttcaccgccgacggcagcatggtgcttaacgacggcgaaaacgggcgcgacataccttacctctaccgccgggacgggtttgatgacggtcggttgcaggatgacaacgacgaatggcgtttcctgtggctgacttctccggacgggaaataccgcgtggtggttggccaggagtgggagtaccgacaggatatggcgctggacgtggtcagctcgcagctgacgccgtggctagtggcgctgcccgtcatgcttttgttgctgattgttctgctgagccgggaactgaaaccgctgaaaaatctggcgcggaccctgcgctcgcgctcgccggatgcgaccgatacgctgcccacccacggcgtgccgacggaggttcgcccgctgcttgatgcgcttaaccatcttttcgcccgtacgcaggagatgatggcccgcgagcgccgcttcacctcggatgccgcccatgagttgcgcagcccgctggccgcgctgaaggtgcaaaccgacgtggcgcagctttcctttgacgatcccggggcgcagtctaaagcgctggggcagctgcatgcgggcatcgaccgcgcctcccggctggtggaccagcttctcaccctgtcgcgcctggattcactggataatcttaatgacgtcgaacccgtgatgatggccgatttgctgcaatccgcggtgctggatatctggcatccggcgcagcaggcgggcattgatattcggctcaacgtcaacgcgcccgaggtgatgcgtcacggacagccgctactgctgagccttctggcgcgtaacctgctggacaacgccgttcgttacagcccccgcggcagcgtggtggacgtgacgctgaatacccaaagctttaccgtgcgcgacaacggcccgggcatttcatccgatgcgctggcgcgtctcggcgagcgcttttatcgtccaccgggccaggacgccaccggcagcggtctggggttgtctatcgtcaagcgtatcgcgacgttacatgggatgagcgtctcgctgggcaatgcgccggaagggggctttgaggtgaccgtcagctggtagccattattgcgctgagcgcaaaagactttgcacattctgcttatttttccgctccgtcctcgcgcgtagaatacccggtatactctcagcatcgaggacaaataatgagcaacattctgattatcaacggcgcgaaagaatttgcgcactctaaaggccagctcaatgacaccctgaccgaggtcgcggatggtttcctgcgcgacgccggacatgatgttaaggtcgtgcgcgcggacagcgattacgacgttaaagccgaagtgcagaacttcctgtgggccgacgtggttatctggcagatgccgggctggtggatgggcgcaccgtggaccgtgaaaaaatacatggacgatgtgtttaccgaaggtcacggttcactgtatgccagcgacggccgcacccgctcagacgcgtctaaaaaatacggttccggcggcctgattcagggcaagaaatacatgctctccctgacctggaatgccccgctagaagcgttcactgagcaagatcagttcttcgaaggcgtgggcgtagacggcgcgtatctgccgttccacaaggcgaatcagttcctgggtatggagccgctgccgacctttatcgtcaacgacgtaattaaaatgccggacgtcccgcgctatatcgcagaatatcgcaagcatctcgcggaaatttttgcttaactggtagcctggaattagaaggagttaattatgcttaccgttattgctgaaatccgtacgcgtcctggccaacatcaccgccaggcggtactggatgagttcgcgaagatcatcccgaccgtactgaaagaagaaggctgccacggctacgcgccgatggtggacgccgccaccagcgcaagctttcaggcgaccgcgccagactcaatcatcatggttgagcagtgggaaaccgtcgcgcaccttgaagcgcatttgcagactccgcacatgaaagcgtggagtgaggcggtaaaaggtgacgtgctggatacccatatccgtattctggagcaaggggtttaagttccgtgaaatttgccgggtggcactgcgtttacccggcctacaaaacctgactcgtaggcccggtaagcgctagcgccaccgggctttttgtatcatcttaatactcaactgctatgcttattctgacttcattgttaacaggaggatggaatgggtctttttaacttcgtgaaagaagcaggcgaaaagctgtgggataacctgaccgatcataaaggtcagagcgacaaagtcaccgagcacctgaaaaagctgaatattcctggcgcggataacgtccaggtcaccgttaccgacggcaaggccagcgtgacgggcgacgggctgacgcaggagcagaaagaaaaaatccaggtcgccgtcggcaacatcgcgggcgtcagcgaagtggagaacaatatcaccgcgacagatgccaaagatgaagccacctactatacggtgaaatccggcgataccctgagcgcaatctctaaaaccgtgtacggcgatgccaaccagtacaataagatttttgaggctaaccgcccaatgctctccagcccggataagatctatcccggtcagacgctgcgtattccgaaagcgtgatccctctgtcgggggttaccccccgactgtttttaccagtacagtttccagctctgcgtaaaacgcaccagtgcctcaacgtagaagtaatcgccccagctcgcgcactcatccacgcctttattgctcgccaggtgatacaccgagtgcttaagcagcccgttgcccttctcttctttgcccatcagatagtgctttgtcagcgaggacataatccctttcgcccattcgaggtaacgttcgcgatccggatctgtgaccggcagatgtttcaccagctccagcagtccacacaccgcaattgccgccgaggaagagtcacgcagtgcgtcggtgcccaccagcgccagatcccagtggcagacgtagtcttccggcaggcgattgaggaagtagttcgccagccgttttgacagggcgatcatcgtttcgtcgccggtatagatatagctcagcaggaaaccgtaaatgccccaagcctgcccgcgcgaccagcaggagtcgtcggcgtagccctgctgggtgttgccgtagcgcggtgcgccggttgccacatccatatagtaggtgtggaaggtggaggcatcgtcacgaatgaggtatgtcgcggcctgcatgacgtgcgcttttgcggcgtcggcaaagcgcggatcgcccgtctgctccgttgcccagtagagcagcggcaggttcatgttgcagtcgatgatcatccgcccggcctgctccggatcggagagatcgccccacgcctggatgattttcgccttctcgtggaagcgttcaagcagggcttccgccgccagcagcgagaagccgcgcgcctcgcggcttccggtcagccgccacgcggctacgcaggagagcgtgtagaggaagcctaaatcgtgggtgttggtgtcgttgcgcccggcgatgcgcaggccaaacgagcgcacgtgtttttccgccatcgcgcggaatttttcctcgccgctcatctcccatgccagccacagctgcccggtccagaagctggtggtccactccacgttgtcagtcagcggataaaaaccgttctggcaggtttccgccgggaatttgtcgccgaactccgttaaatgacggctaatcaggtcaagaacgtggctgcgcgccgaattcagttcatcgctgaatgcgcgggagtcaacgggcgcagcgataacaggcagacgttcttctttgatacgacttaacatatttcggttccttctttgacggcgtaatttatcgtgttgacgtttctgctacgttcagcgcacgagccccgcgccatttgctctgacaggcggataacgtaaaagcagaaataagggtaaaggtcagcgccgttgcgcccatgatgatataggtgtgctcaaagccaatacggtcatacatatagccggcaggggaagagaccaccacgttgccaacgtagagcatcgcctgatagccgagtaaatacatggtggcattgacgcgcttgtcgaaatgctcggcgatatatttaaataccgacaccagcaggagacaaatttccagaccgtatagcggcttaagcactgaaattaacaagtgtgaatcacacatgccggaaataatcagacgcgccccaaccaccagcccgacaattaacagcccgcgtttggcgccaataaagttcacaaacagcgggaccaccatatacatgacaaattccatgcccgactgtacggtcccgagatagccgaatacggcgttgccctcatgaatatcatcgaagaaggtgacgaaatagcgcgagaattgctgctcggcgataaacatcatccacgccacgcccgccacgtacaggcagaaggcccagaatttgcggttacgcagcagggcgtaaacgtcagacggggctattttctctttcgtcagcacctcgcctgcgtgagcggagttagtgttcactttcaggctcagaaggacaatcagcatcaccaccgacgccacgctgccgagaataaagttatacgccggtgagaggttgaacagcaggccggagaaagatgacgccaccgcccagccgagcgatccccacatacggatctgcccgaactccatgccattcaaacggctaaagcggtcggaataggattcacacgccgccacgcccgcgtaccaggcaaagcttaaatagagcgcgccgataataatccccagcagggtattagacattaacaacggctggtaaacataaataaagaatggcgccatcagggccgacatgatcaccacaaaatagagcagatatttgctcatgccgatcttatcgagaatatagccgtagatcggcttgagaataacggagaatatcccgttcaccgcaaagacggttccaatcaccgatccgctcaggttggctttctgaccgagccagatcgccagcagaccaatactggcagaccaggtaaagaaatagagaaagataaagctgctgattttgtaatattcagttctgttggttgtcgatgtgcttttcatatcatcctcgccggggtgtagggccagatttttataatgtgaacgacagcttacgttcgcttccgggttcgctaatcacgacctggttatgggttatattcagctgcggcgtcgccgcagcgggctgttttccgccagccagaacggcgcaacagagccagctttccccttgcgggaggtcagcttttaacagcggaatggaggcacactccgcaaacataatgctgctgttcggcggcgtgacgatgctgtctggctggcgatgaatgatcggcgaaagatcgacaatgacgctgctgccgttttcagccaacagataacaaccgcgttcgcgcacctggtgggcggttttcatcaccgcaaagccgccctcgacggtttgcagagtgcgcgcgctgttgatacggtgcaggcgcaggtgccactccccgaacgggatctgccaggtcgcaatctgcacgtcgcgccacggcgaccagcgcgagaaaatgtaattttcatccacccgaacctcttcgcactcgcgacgaccgcggaaatagtcatctccgtccgccagcagcagcatggaatcgcaggcggcatgcttcaggccaaaacgcccgcgctcaagggtgaatccgaagcggctggagtaggcaaatttggtgtatttcgcttcggtgttgacgtagttgttcagctccagctgaccggcggtgagcatgacgacgtgctgagaatctttcgaatgcatcaggatctgctgcgcatgcggaatcacatgtttttcagcaagcgcgggcagcggttgttcttccgcctgccagaacgggtgtgcttccggcagcgccaggatcagataggttttcagcgcccagtacggtgaaccgggggagttgtaatcctcgcacatcgccaggttcggatacgcaaaccccagggtaagaataccgtcgcgatcgacaatcgactgctgctgccaccagcgcagatgccgcagcacaatgcccttcacgatgcccggggtgaagacgtccagctgagaaaaggccaccgcgctccagaaggcgaccatagcaaaacggtaggtcaggctgcggccaaacggcaccgaggcgccatcggcggcggaccagtagataaagtcttccgcgaacagacgcgagcgctcgcgcagcaccttcgccctcgcctcgtcttcactcaaggtggcgtaaatcaggccgtagaaatggaaagccatggagatgtagtaatctttcgggcggccgggaccgtcggaataccagccgtcgccgaggtagtaggcgtccatcagcgcaaagcggtggtcaatggcggcccgatcgtacggcaggccggcgcgcttaaagccgagctggaccataatggcaaaatagttccagttgctgtccggcatctgcgcatcggtgatttggttgagccacgcgtgcaggttcatcacctcgcgcccggtaaagtgcgcggtgagtttatcccccagcagagcgagccccagaccgtaggccgccatctccaccagacgctgatcgtacgggccggtttcaccccagtagccgctgctttgcgggtcggtaccaagcttaatggcagtaaggtacttctcgctgaacggcgtgctttcgccagatgccatcagcggaaacagcccccagagcgcgcgagaaagtccctccatctgcgcaatatccgctgtgtaatgggcgcaggtgtcgcccagcgggaatcgtgaacggttcgccggaaattgcgtgtccagcgcctgtaaaagtgcattcaacgacgccactacctcctggcgtgaagacaacggatttgatttttctttgtttgccgcccacatcggttcgccctcgtaatcaactgcggcaaagcatagtgaatccgcaaggggcagaaatgttagccatgtcacaggcatgaacgatgaataaacctccagttgagaaaatttaaaaaggtggtttataaagacgatcagacgggaaaaagttgagttttattgcactatgcgcgacacgccgacatccgaccttctggaactgatcgccctgaacgataccgtggcctcgttcagccgcctgtttgccaatacggtgcgctaccatcactggcatcagtgtctggagatcctctatgtggaagagggctttggcgtggcgattgtcgataatcgtcactacaccatgcgccccggacgactgtttttcttcccgccttttacgctgcacaaggtcatggtggacgaacaggcggaggcaatttaccgccgcaccattattcatctcgaccagcacgcggtgctgaagatcctgcgggattttccccagacccggcagcgcctggagcggctgtcacgccgtggcggcgaagcgtgggtcgccgatttagcccactgtcaccaccatatccaccatctgtttagctgctataaaccgccgatgcacggcgagagcatcgccagcctgctgatcggcctgttcgcgatgctccccgacgatcgcgacggtgagccgggcaacagccaggggatcgccagccaggtaatgttctggctcgacgagcattatcaggagaaatttcgtctggatgcgctggccgaagagctgggtaaatcacgcagttacgtatcgcgaagattccatgcggaaacgggcgaaaaaattcacgactacctgaacacgctaaggttgcgtaaggcgtgcgagtgtttactccacacggattcgagcgtgcgtgacattgccgcacaggcgggattttccgacgtgacgtggtttatcagcgcatttaaaaaggggattggcgagacgccgttgcagtacaggaagaaccatcgtgcggtttgacgccctcacccccgccctctcccacggggagagggggaagatcaaccgctcttcttccccggctttaatccgcggtgtaactcgttgatgcgcttcatcgacttgatggtgcgctgcggctcggtggaggcgacggacagaataatcatctccaggcacaacagcaccgtgccgtgcagcgggattttgcccttctcgccgccgcgcgggacgtggatcactacgcttgcctctttgctaaagcgcgagtccgtggcgttggtcagcaaaatggtgggaatacccaggcgcttcgcttcgcgcagcgtggtctgcccctcccggtgcgcggatttttgcgccatcattaccagcacgtcaccgcgctgtagggcaatcagctgttcggcgaggccaataccggtgcggttgagcgggatcgcaggtaggcctatacggctaaacagtcgcgaggtgtactcggccagaatgccggatgcgccaatgccaaaaatagcgacctgtctcgcctgcgccagcagcgacacggcctgcgccatcgcgtagcggttgcccggttcggacaacaccgcgcaggtgtgctgatggccttccagcacaaaatcgatgctcgcgtcgacgtcgctggtaagcgtgtttaccgtggtggacatcttctcgctggaggtgaccaccgggccaaaccactgctccagggtctgcttgagatcccgcagcccgccaaacccaagcgcctgaatggcacgcaccacggtggcgtccgaggtgtgtagcacagcggcaatctccattgccgtctgctccataaccgcttcacgattttcattgatatagctcgccacctgcagcagacgcggcgtcagctggtgcgcccgcgagcggaggcggtcgccgtagacatcaatttttcggatcatcgtgcggcctccggcagcggacggcccgctatctgcgactgcacctgcgcggccatcagccccagcgaggcaaatgaatttgagatcgcttcctcgcgggagatgagcacgtaatgcccggttcggcaggcgttgagaaactgacaccagcccggcatcaccgcatccatcgccgccagctcgtcctgcggttttccgccagtgtccccgcgccaggtggcaaagacaaaatcagcatccagctccggcaggcgctcggcgctgacgtcgatgcgcccgccctccgggatgctctcaatcagcggcgggaacctgaaccctgcgtcgcgcagcacgcgcccaagcgagtggtagctgtgcatggcgttgattttgccctgattggcctgaatcaccgagacggtcagtttgctcgtatcgatggtcgcctttagcgcctcgatctgctcctgatagcgacgctccagaatcttcagccgcgcctctgtcccggtaagctgcgccagcttgcggtagatctccggcgcaccgccgtcgaggtgatcgatactcaccgtcggggcaattttttccagctgttcgaccggcgtgttgcgggtcggctcggtgatgataagatccggcttcgccgcagcgatggcttcaatatcgatatccgcggtgccgatgaatgtgatgtcggaattatcaaaatcgatgcccgtcagcataccgctggaacgcagaaaatggctgccgtccggtcgggtgcggccatggctggcaaccggcggtacgccaagctcgatcagcggaatggtgatatccaggtcgtgcagggacacaatccgcttcgggttaaccggcaccaccacgttgcggttcaggtcgtcagtaaacgtctgcgttggctctgcggctcctacagcaaaacccaccagcaccagcattgcaaaaaatacgcgcatttttatcccctaaaatcgatcccgacgctgccagagcagcagcaggaaaaacggtccgccaatcagtgaaatgacaattcccgccggcagctgcaacgggagaaatgccagccgcccgacgttatccgccagcagcaccagcagcgcgcccagtacggcacttcccgtcagcagtgccgtttgccctccgcgcagcagcaggcacgccatgtgcggggcaatcagcccgacaaagccgatactccccacgcaggagacgcaggccgcggtgagcaccacgggggcaaacacgcgcagcagagcgaggcgtgaagtccgcacgcccagccccgtcgcagtgtggttgccgagcaaggctacgtctgcggcgcgtgcggtaaagagcagcagcgcaaacgccggcactgtccaggcagcagcgatgctgaccagcgtccagcttgccgcatgcaggctccccgccagccacagcatcgccgtctggacgtcgcgcacgtcggcggtcgtcataaagacccccatcgcggcggcaaacgcccatgacacgccgatgccgatcaggatgaatcgcgggcgcgagatatcacgcgccagcgccactaccagcagcgcggtcagcagcccaccggccatgccgataagtggacgccagtacggccccaatcccggaaactgaaaaatcagcagcagcaccgccgcgctacagccctctttcacgccgataagaccggggtcagcaaggccgttgcgggtaatggactgcatggccgcccccgccatgccgagcatcgcgccgcacagcaccgccatcagcaggcgcggcaggcggatatccatcacaatgtaatgcgcatccgccgtcagacgttcaggataaaacagcgcacgtccgatggcggaagcaggaatgggcagcgaaccgtgcgtcaggccaaaacttagcagcaggagagcggcaagcgataatacggccagatacagcagcgccctcgggcgaaccagcgccgagaaggagaaaaatcgtactgccctcaatccagcccggttcatttgaacatccttgacgccataaggataaagaccggcgcgccgaccagcgcagtcatcacgcctgttgccagctcatacggcgtaaatagcgtacgggcggcgatatcagccatcagcagaaccagcgccccgcagagggctgaaagcggcaccatcacgcgcaggtccaccgataccagacggcgaatcagctgcggcaccacgagtccgataaacccgatcggtccggcaactgaaaccgccgcgccgcacagcagggcgatggccagcagcgcgagcaggcgcgttttcagcagcgacacgccaagcccctgcgccattctctcgnnnnnnnnnnnnnnnnnnnnnnnnnnnnnnnnnnnnnnnnnnnnnnnnnnnnnnnnnnnnnnnnnnnnnnnnnnnnnnnnnnnnnnnnnnnnnnnnnnnnnnnnnnnnnnnnnnnnnnnnnnnnnnnnnnnnnnnnnnnnnnnnnnnnnnnnnnnnnnnnnnnnnnnnnnnnnnnnnnnnnnnnnnnnnnnnnnnnnnnnnnnnnnnnnnnnnnnnnnnnnnnnnnnnnnnnnnnnnnnnnnnnnnnnnnnnnnnnnnnnnnnnnnnnnnnnnnnnnnnnnnnnnnnnnnnnnnnnnnnnnnnnnnnnnnnnnnnnnnnnnnnnnnnnnnnnnnnnnnnnnnnnnnnnnnnnnnnnnnnnnnnnnnnnnnnnnnnnnnngccagcatgttcagcgacggcgacagccagagcgccagcgcaaaacccacggcagcggcccccgcggcgctagcgatcgtctcgccgatgactcccgccacatcccccgcaagccaggtccgcatggccagcagcgtctgttcatccagaatcaacaccgtggcggttatcgatgaggcaaatgccgacattgccacgccgcacagcgtgaccttcatcggcgtgagaccggtacgcccggatgaggagaacgttagcaccagcaaaaagagcgcggcggcgccagctgcggctatcagagggcggccaaacggcagcgacagcccgagggcactcgtcagcaccaccgccagcgccgcccctgcattcagccccaggatatgcggctcgccgagcgggttgcggatcactgattgcagcagcacgcccgcgacgccgagcgccgcgcccgtcaccagggcggcgcatagccgcatcaagcgcagcctgacgatcacgctatgctcaaaattgcgcgggtcgaagtggaaaaatgcgtctactaccgtccggggggcgataacgcgcgccccgatgctcaggtgcgcaatcgcgcctgccagaagcagcagcgtaaagagaataaaggccacagatgtgcgcatcatggtttgtcgtcagcctgacggaacggcataaagaacggcttgccggtcagcgggttaaccgacatatgcacgtcgacgtcaaacaccgctttgatcagctccggcgtgcaggcgtcgccctcatgcagtaccccctcaacctttccctgacgtaaaaagaccagcgaatcaccgtaattcacggcgaagttgagatcgtgcagaaccaccaccacggtgcgcccgtgccggcgcgtcagcgtgtgcagcagttcgaggatctccacctggtagcgaagatcgaggtacgtcgtgggttcatccagcaggatatagggcgtttgctgcgccagcaccatagcgatccagcagcgctggcgctggccgccggacaggctttcaaccagatgatgggcaaactctgccgttccggtcaggcgtaacgcctcttccacggcccgctcgtcttcctcgctccactggcgcatcacgttctgccaggggaaacgtccgcgcgagaccagctcaaatacggttaacccttctggaagcagcggagactgcggcaggatcccgagctggcgggcgaccgctttggttggctgcgagtggatggctttgccgtccagcaccgcgctgccgccgagcggctgaagcagccgtgcgagggtacttaacagcgtcgattttccgcagccgtttgcgcccaccagaacagtcattttctgctgggggatcgcaagggagatatcatcaacgatgatttttttctggtaacccgcggagaggttctcaagaaccagtcccggctttttgatgtagtgagccacgtgaacgccaacgtaagaaaaaaaaccaacaaataaaaataaaactcattctcttttgtgagtttgccgccgctccatgtagtagtcaagcgaagatacaccctgtaaaactcagggataattgagcatcaccgcacaaattaaaattcatttttattaattattttcaataccttaaacaagaaatcgaagcgtgttagccagagagaaacctctgtagcgaaatttttatttattccatttactactacatgccctcatgcttgaatgattctcaattacaagtccgatgccgtagaggctaacggacagaccgtaagggcaatgactcacacattcttccgcgagcatttcatcgcaggatattttgggaaaacagatgtaatggctaagttcacaccttcattcgccggggtaaaagggcgcgcgctcttttcactcctgttcatggcgcctctggtgcacgcagcagcaaaagacggtgagacgcttaccgtcactgccgatccttacgcttccaccgacgccaccagcggctatcagcccctgaacacctccaccgccacgctgaccaacatgccgatgctggacatcccgcaggtggtcaataccgtcagcgataaagtgctggaagaccaaaacgcgaccacgctagacgaggcgctgtataacgtcagcaacgtggtgcagaccaacaccctgggcggcacgcaggatgccttcgtgcgccgtggcttcggcgcaaaccgcgatggctcgatcatgaccaacggcctgcgcaccgtgctgccgcgcagcttcaatgccgcaaccgagcgcgtggaggtgctaaaaggcccggcctcgaccctttacggtattctcgaccccggcggcctgattaacgtggtgaccaaacgcccggagaaaaccttcggcggctcgatttctgccacatcaaccagctttggcggcggtagcggacagtttgacgtcaccggtccaattgaaggtacgcgtctggcctatcgcctgacgggggagtatcaggacgaggattactggcgtaatttcggcaccgaacgcagcacctttatcgccccgtctttgacctggttcggcgatgatgccaccgtgaccgtgctctattcgcatcgcgactataaaacgccgttcgatcgcggaacgatcttcgatctcaacaccaaaaaggccgtcgacgtcgatcgcaaaacccgctttgatgagccatttaacgtgaccgacggtcagtccgacctcgctcagcttaacgcggagtatcggctcaacagccagtggaccgcgaagttcgactacagctacagccaggataagtacagcgataaccaggctcgcgtgatggcctacgattcaaaaaccggcaacctgacccgccgcgtggatgcgacccagggttcgacccagcgtatgcacacaacgcgggcagatttgcaggggaacgtggacatcgcgggcttttacaatgagatactgaccggcgtgtcgtatgaaaattacgatctgctgcgcacggacatgatccgttgtaagaacgttaaggatttcaatatttacaacccgagctacggcagcctcggcaagtgcaccaccgtctcggcagccgacagcgatcaaaccatcaagcaggagagctactccgcctacgcgcaggacgcgctgtacctgaccgataaatggatcgccgttgccggactgcgctaccagtattacacccagtacgcgggcaaaggccgtccgtttaacgtcaacaccgacagccgcgacgaccagtggacgccgaagctgggcctggtatacaagctcacgccggcagtctccctgtttgccaactattcccagacgtttatgccgcagtcgtccattgcgagctacatcggcgacctgccgccggaaacgtcgaacgcgtatgaaataggcgctaaattcgacctgttcgacggcattaccgccaacatcgcgctgtttgatatccacaagcgcaacgtgctgtacaccgaaagcgtcggtgatgaaaccgtcgccaaaaccgcgggtcgcgtgcgctcgcagggtgtcgaagtggatctcgccggatcgctgaccgagaacaccaacattatcgccagctacggctataccgatgcgaaggtgctggaagacccggactacgcgggcaaaccgctgccgaacgtaccgcgccataccggctccctgttcctgacgtacgatattcacaatgcgtttgccgggaatacgctgacaattggcggcggcgggcacggcgtaagccgccgctcagcgactaacggtgcggattattatctgccgggctatttcgtggcggatgcatttgcggcgtacaaaatgaagctgcaatatccggtgacgctacaggtgaacgtgaagaatctgttcgataagacctactacacgtcgtcgattgcgaccaacaacctgggcaaccagattggcgacccgcgtgaagtgcagtttacggtgaagatggagttttgacgtaaaaaagcccggtggcgctaacgcttaccgggcctacgatcctaaccccctccctgtgggagagggttagggtgaggggacatcaggcctcaatatccgccatatcgcctttctcctggagccagttacgtcggtcttcagaacgtttcttggccagcagcatatccatcacggcgttggtttgttgttcgtcttcatcgctgatggtcagctgcaccagacggcgggtgttcggatccagcgtggtttcacgcagctgcatcgggttcatctcgcccagccctttaaagcgctgaacgttcggtttgcccttcttgcgtttgagctgctccagcacgcccgctttctcttcttccgtcagcgcatagtagacttctttgccaaggtcgatacggtacagcggcggcagcgccacgtggacgtgaccgtttttcaccagcgtgcggaagtgcttcacgaacagcgcacagagcagcgtggcgatgtgcagaccatcggagtccgcatccgcgaggatacagatcttgccgtagcgcagctggctcagatcgtcgctgtccggatcgatgccgatcgccacggagatgtcgtgtacttcctgcgaggccagcacttcatcagacgagacctcccaggtgttgaggatcttacccttgagcggcatgatcgcctgatattcacgatcgcgcgcctgcttggccgatccgcctgccgagtccccttccacnnnnnnnnnnnnnnnnnnnnnnnnnnnnnnnnnnnnnnnnnnnnnnnnnnnnnnnnnnnnnnnnnnnnnnnnnnnnnnnnnnnnnnnnnnnnnnnnnnnnnnnnnnnnnnnnnnnnnnnnnnnnnnnnnnnnnnnnnnnnnnnnnnnnnnnnnnnnnnnnnnnnnnnnnnnnnnnnnnnnnnnnnnnnnnnnnnnnnnnnnnnnnnnnnnnnnnnnnnnnnnnnnnnnnnnnnnnnnnnnnnnnnnnnnnnnnnnnnnnnnnnnnnnnnnnnnnnnnnnnnnnnnnnnnnnnnnnnnnnnnnnnnnnnnnnnnnnnnnnnnnnnnnnnnnnnctgggcggtacagtccgccagcttgcccggcagcgcggggccgctggtcagctttttacgcaccactttcttcgccgcgcgcaggcgacgctgggcgctggagatagccatttcagccagcatttctgcggcctgaacgttctggttcagccacagggtaaacgcatctttcaccacgccggagacgaacgccgcacactggcgtgacgacaggcgctctttagtctgaccggcaaactgcggatcctgcatcttcacggagagcacgtaggcgcagcggtcccagatatcttctgcggaaagcttcacgccgcgcggcagaatgttgcggtattcgcagaactcgcgcatcgcatccagcagcccctgacgcaggccgttgacgtgcgtcccgccgagcagcgttgggatcaggttgacgtagctttccgtcagcagctcaccgccttccggcagccacagcagcgcccagtccaccgcttcggtgtcaccttcgaaattcccgacgaacggtttttccggcagggtcggcaggccgttaaccgcttcgcacaggtagtcgttcagacccttttcgtagcgccagctctgttcggtgttgtttacgtgatctttaaaggtgatttccacgcccgggcacagcaccgctttggctttcagcaggtgcgtcaggcgagaaacggaaaagcgtgggctgtcgaagaagctttcgtcaggccagaaatggacgctggtgccggtgttgcgtttaccgcacgtcccgacgacctgcaaatcctgcactttttcgccgttttcaaacgcgatgttatacacctggccatcgcgacgaacgttcacttccacgcgctttgacagggcgttaaccacggagatccccacgccgtgcaagccgccggagaactggtagtttttgttggagaacttaccgcccgcgtgcagacgacagaggatcagctcaacggcgggaacaccctcttccgggtggatatctaccggcatgccgcggccgtcgtcgataacttccagcgactgatcggcgtgcaggataacgtccacgcgtctggcatggcctgccagcgcttcgtccacactgttatcaattacttcctggcccaggtggtttgggcgcgtcgtatcggtgtacatccccgggcggcggcgaaccggctcaagcccggtgagtacctcaatggcatcagcgttataggtttgcgtcatgatttaagctagcaattcgcattgattgtcagtggctgtgcagtccaagaaaatcgacaatctgggtgaaatgatcttcaaagcccgtgaaagcatggttaccgccctcttctacagtctggcggcaggatgcgtaatacgccactgcctggcggtaatccagcacttcatctcccgtctgttgcagcagccagataagatcgggcgcttcaagcgggtcgacctgcataactttgagatcgtaaatatggcgtgactctagcacatattgttggccggtgtaggggttctcgttttcgccaagaaagtcccttaacagctcaaatggccggaccgccgggttgacgacgacagcgggtaacataaagcactgcgacagccaggtggcgtagtagccgccgagcgacgacccgacaacgccaaacgattcgccgccgtgttcaagcacgatcgattccagcatctctgccgcatccgccggataagggggcaactgcggaataatcatctccacgtggggatgattcgcgctcagccactggcgaagctgcgtcgctttcgccgatcgcggtgagctgttaaacccatgcagatagagaagcgtcgacatcaatagccttccgaagcggtatccgggcggaattgagccccggtcagacggcaaacttcggtggtcagcgagccatcggcatgcagctccagccagcgccagcccggtgcgatggtatccagcgtaaagttggcgcagtgcggcttaaactgcacgcaggtagagggcgtcgcgagcaggcggcgaccattccagtcgagatcctgttcctggtgaatgtgcccgcacagcaaatttttcacgcgcggaaatttcgccagtacgccgtccagcgccgcagagttgcgtaagctgtgctgatcgagccagctacagcccgccggcagcgggtgatgatgcagcaacagcagcgtattgcgattcggttcggcggccagttttgtctccagccagtcaagctgatagtcgctcaactcaccgtggggaacgccaaacacctgactgtcgaggagcagaatttgccactggtcccccgcaaagacacattttgccggtgaaatccccgcatcctgaagcgaactgtacatagcgggttgaaaatcgtgattgcccggtagccagacgcaaggcacgctaaagctcgcaatcccttcagcaaagtgctgataggctgcggaggattgatcctgcgccagatcgcccgtcgcgacgatcagatcgcatggccgcttttcagcatggatcgcgtcaagaaccgcctgataactctcccaggtgttcacgcccagaagcgtctcatgcttttcggcaaaaaggtgggtgtcggtgatttgtaatatcctgactggcgccccaccagcaacagtcaggttcaacaggctttccaaatggtgtccttaggtaggtttatgacgctaacaaaccggaatcgccattgctccatgtgctaaacaatatcttagccagtcggctaaaaactggttaatttgatgcttttcgtcgcgttgatgcaactttttattcgggtaatcataccgcgctttaaagcgaaagatctgctggcttgaacacacttcagcgaccatcgcgtcatgataaagacgtaccgtcatcgacggcaggctccagtagctgatgctcggcgccgtttgctcaatctccaccagcgtagtgtagcgcgttgattctgttatcgttaaccgatactgcgcgttgctcacctgatagctcaccgtttcgccgggcgcgtcgtttcgcggcagcaggcggcgcagctgggcgaaattggtttcgcacaggcgcatcatttctgggaagtcaggtgtataacgcttcattttttccactcgtgtcgtaatgtctgataatgcagctgtagccattgcagggcgatgacagacgctgcgttgtcgattttcccctcttctacccactggtaagcctgctcccgactcaccacatgaacccgaatatcttcgttttcatctgccagaccgtggatcccttccgctgtcctggcgtccacttcgcccaccataatagatgaacgttccgttgtcccacccgggcttgccaggtagctcaacaccggcttcgtccggccaaccaccaggcccgcctcttccagcgcctcgcgacgcgcgacgtcttcgaccgactcaccttcttcgatcatcccggccaccatctccagcaaccacggcgtttcgctggtatcataagccgcaatacgcacctgctcgaccagcacaacttcatcacgcactgggtcatagggtagcaacacagccgcatgcccgcgctcaaaaatttcgcgtttgatttcaccgctcatctcaccgttaaacagacgatgcctgaaacggtaaagttccattgaaaaaaaaccgctataaagcgtttctcgtgcaataatttctacatcgtttttggcgaaggtgacaggcacgttttctggtttttgcatcggtcgagtcctggtagcaatggtgatgaaattgtgaatttcaaggctgtttggctgccgtttgtatggctatatggtagattggagcaaattaccgccagatggcacgttacgccaaccttttggtgtggatgattctgttagaatcggcaattatttttaattagatcagcgctaatactgcttcacaacaaggaatgcaaatgaagaaattgctccccatccttatcggcctgagcctgacgggcttcagtgcaatgagccaggcagaaaacctgttacaggtctaccagcaggcacgtctgggcaaccctgatttacgtaaatcagcggccgatcgtgatgctgcgtttgaaaagattaacgaagcacgtagtccactgctgccgcagttaggcttaggtgcagattatacctacactaacggttttcgcgataacaatggcatcgattcgaatgccaccagcgcctctttacagcttacacaaaccctgttcgacatgtccaaatggcgggaactgagcttgcaggaaaagagcgccggcattcaggatgtcacctatcagaccgatcagcagacgctgatcctgaataccgcgaccgcctatttccaggttctgagcgcgattgacgccctctcctacaccgaagcgcagaaacaggcggtttaccgtcagttagatcaaaccacccagcgttttaacgtgggcctggtcgccattactgacgtgcagaacgcccgttcacagtacgataccgtactggctaacgaagtgaccgcacgtaacaacctcgacaacgccctggaagcactgcgtcaggtcaccggtaactactatcctgagctggcctctctgaacgtggacagtttcaaaacggacaaaccgcaggcggttaacgccctgctgaaagaagcggaaaaccgcaacctgaccttgttgcaggcacgcctgagccaggatctggcgcgcgaacagatccgtcttgcacaggatggtcacctgccaactctgagcctgagcgcctctaccggcgtatcggacaccagctacagcgggtctaaaacgacctctcaggcctatgacgacagcaacgttggccagaacaaagtgggtctgagcttctctctgccgctgtaccagggcgggatggttaactctcaggttaaacaggcgcagtacaactttgtgggtgccagcgagcagctggaaagcgcacaccgcaacgtggtgcagaccgtgcgttcttcctacaacaacgtaaatgcctctatcagcagcatcaacgcctataaacaggccgtcgtctctgcccagagctcactggatgcgaacgaagcgggttactccgtaggtacgcgtaccatcgtggacgtgttagacgcaacgaccacgctgtataacgcgaaacagcagctctccagcgcacgttatcagtatctgattaaccagctgaacatcaagcaggcgctgggtacgctgaacgagcaggatctgcaaatgctgaacagcacgctgggcaaaccggtccctacgtcgcctgacagcgtcgcgccggaaaatccacagcaggatgccgccgttgataatttcacccctaacagcagcgccccgcttgcgcagccagcggcagcgcgtagcaccgcacctgccagcagcggtacgaatccgttccgtcattaggccttgcccgatggcgctgagcttatcgggcctacttaatcgtaggccgggtaagcacagcgccacccggcgcaaaatcacacctgaacgtaagccaacgtaaagatcccccgcatttcgcccctcttcgcttcattttcaaccactcatcctctatcctgagcgttattaccactgggtcctggaagacaaatatgaaacggacaaaaacgatgaatcacgcgtcgttccgcaaaagctggaacgcacgccacctgacacctgtcgcgctggcggtcaccgccgtctttatgctggcaggctgtgagcaaaacgacgaaacggtttcgctgtatcaaaacgccgacgactgcgcgagcgcaaccggtaaagccgctgagtgtacgacggcctataacaacgccctcaaagaagcggaacgtaccgcgccgaaatatgcctctcgcgaagactgtgtagccgaattcggtgaaggccagtgccagcaggcacctgctcaggcgggtatggcaccggaaaaccaggcgcaggcacagtccagcggcagcttctggatgccgctgatggcgggttatatgatgggccgtttgatgagcggcggtgcgggctaccagcagcagccgctgtttagctccaaaaacccgaacagcccggcctacggtaaatacaccgatgccaccggcaagggttacggtgctgcaacgccaggccgtacgatgaccgtaccgaaaaccgcaatggcgccgaaaccagccaccaccagcaccattacccgtggcggctttggtgagtctgttgccaaacaaaccaccatgcagcgtagtgcgaccggctcctcaactcgctcaatgggcggctgatcatggaacgagtcagtattgttgagcgcccggactggcnnnnnnnnnnnnnnnnnnnnnnnnnnnnnnnnnnnnnnnnnnnnnnnnnnnnnnnnnnnnnnnnnnnnnnnnnnnnnnnnnnnnnnnnnnnnnnnnnnnnnnnnnnnnnnnnnnnnnnnnnnnnnnnnnnnnnnnnnnnnnnnnnnnnnnnnnnnnnnnnnnnnnnnnnnnnnnnnnnnnnnnnnnnnnnnnnnnnnnnnnnnnnnnnnnnnnnnnnnnnnnnnnnnnnnnnnnnnnnnnnnnnnnnnnnnnnnnnnnnnnnnnnnnnnnnnnnnnnnnnnnnnnnnnnnnnnnnnnnnnnnnnnnnnnnnnnnnnnnnnnnnnnaatacggtttcaactttcacaccatgtacggcgagccgtactggtgtgaagatgcttactataagctcacgctcgttcaggtcgaaaagcttgaagaggtaaccgcagagctgcaccagatgtgcctgaaggtagtagaaaaagtcatcgacagcgatgagctgatgaccaaattccgcattccgaagcacacctggagttttgttcgtcagtcctggaaaacgaaccagccttcgctctactctcgcctcgatctggcatgggatggcgtgggtgaaccgaagcttttagaaaacaacgcggatacaccaacctctctgtacgaagccgcgttcttccagtggatctggctggaagatcaggcgaatgccggaaacttgcccgaaggcagcgaccagttcaacagccttcaggaaaagctgattgagcgtttcgtcgaactgcgtgaacagcacggtttcaacctgttgcacctcgcctgctgccgcgataccgaagaagatcgcggtacggttcagtatttgcaggactgcgcagccgaagcggaagtggcgacggaattcctctatatcgaagatatcggtttaggtgaaaaaggtcagtttacggacatgcaggatcaggtcatcagcaacctgttcaagctctatccgtgggaatacatgctgcgggaaatgttctctaccaaactggaagacgccggcgtgcgctggctggaaccggcctggaagagcattatctccaataaagccctgctgccgatgctgtgggagatgttcccgaatcacccgaacctgctgcctacttactttgctgaagatgatttcccaccgatggagaaatacgtcgttaagccaatcttctcccgagaaggggcaaacgtctcgattatcgaaaacggtaaaacgctggaagcggttgaagggccatacggtgaagaagggatgatcgtccaggcgttttatcaactgccgaagtttggcgacagctatacgttgatcggcagctggcttattaacgatcagcctgccgggattggcattcgcgaagatcgcgcgctgattacgcaggatctgtcgcgtttctacccgcatattttcgtcgagtaagacttgcccggtggcgctacgcttaccgggcctacgctcaatatgtaggtcgggtaaggcgaagccgccacccgacatgtttttaccccacctgcaccgacagcatactcaagctccccatctcaataccgtcgaccgggattgtaataacctcctgaccatcccacgcgcctaatacatacagcaatggcaagaagtgttccggcgtcgggttagagagcgaaccgccgtcatgatccagatagttcaccaaagggtgtcgttcggccggcccttgccaggtcaggttgtcttttacatagtcattaaaggctgttgcccaggggtacggcgtattttcaccgtgccagcgtaccgtacgcagattgtgtaccacgttgccactggcaatcagcatgatgccctcatcacgaagcgaagccagcttacgccccatctccatgtgccaggcagccggtttggtgctgtcgatactcagttgcaccatcgggatatcggcatccggatacattttgatcaacaccccccatgagccgtggtcaaagccccaggcttctttgtccagcgcaaccggaacaggggcgagcagatcaacgagccgctgcgccagctcgggggagcccggagcaggataatgcgtgtcatacagcgcctgcggaaagccgccaaaatcatgaatcgtttttggcgcttccatagccgtcacaccggtaccccgggtaaaccagtgcgcagagaccaccacaattgccttcggacgcggtaacgtctcacccagctgacgccaggcacgggtatagacgttatcttccaggacgttcattgggctgccatggcctaaaaacagtgctggcatacgagaagaagacatggtgatatccttagagaaggtgtcaatgtgatgggcctacattacgcgcattcaggtgaagatgaacgcagataaccgtgaagatcatcatcaggaaatttgaatgtaagatatcgcttaaggagaatgcatgtcagtaccgttgattttgaccttactcgcgggcgccgcaacctttatcggtgcgttcctcggggtactcgggcaaaaaccctctaatcgccttctggccttctcgctgggtttcgccgccgggatcatgctgcttatctcgctgatggagatgctgcccgccgcgcttcacaccgaaggtatgtcgcctgttctgggctatggcatgtttatcattggactgctgggttattttgcgcttgaccgtattcttcctcacgcgcacccgcaggatttaatgcaaaaaagcgttacccccatcccgggcaatatcaaacgcacggccattctgctgacgctgggtatcagcctgcataactttccggaaggtatcgccacctatgtcacggccagcagcaacctggaaatgggttttggtgtggcgctggccgtggctttgcacaatattcctgaaggacttgccgttgccgggcccgtttatgccgccacgggttcaaaacgtacggctgtcttttgggcgggtatctccgggatggctgaaattctcggcggcgtgctggcgtggctgatcctcggtagcctcgtctccccgattgtgatggctgcgattatggctgccgtggccgggattatggtcgcgctctctgtcgatgagctgatgccgctggcgaaagagatcgatcccaacaataaccccagctacggcgtactgtgtggaatgtcagtgatggggatgagtctggtactgctgcaaacggccggtattggctaagaatttatgcctccgttttatacggaggctatatattattcaaaaaaacaatcctatatatttcacctataataacctgaaaaatatagacctgttaaaaccccgaaaaaccacgcctcttaaaatagcctgcaaatattaattaaaaccatctaaaaatatatttaagtcatgttaatcgcgtctccccaccccaattcgtatacttcgcgagtattctgaaattaatattcacattatgaatcactctgaaaaaggatattttcatgtatatgggtaaaaaactactgttagcgacggctatggcagtcattgtatcgggtgctgcttttgcagatgatcaaggctcaggaaaaatcacattcaaaggtattgttattgacgcaccgtgcagtatcgcaccagatagcgttgataaagaagtcgatctgggtgaagtgaccacggctgttatcaacgccaacaaaaaatctaccccggttccggtcgatatcaatctggaaaactgccagcttgacgatccggcagacgagaccgacacgccaattaccaaagtggatgtgacctttaccagcgcagcgacagacgcggcggataccagcctgatgagcaacacctatgcaagcggtgcgcagaacgtgggggtgcgtctgctggataacgcggagtctgctatcacgctgggagaggccaacgaggttgagttgctggcgggttcaaccacccagacgctgcatttcaaagcggttatggaagtccctacaggtaaaactgcaacggcaggccaggttgaagccacggctaactacgtcctgatgtacaaataattctgttacgtcacggcaccagccgactggtaattcatgccggtcggcactctctatttactcgagtaacaggatgatgacatacaaattacaatggataatcatcattgcgtccctgttaatgacgaaagttgcctctgccaccgagtttaatataaacgccatcgataaagatcagcgcggcagcgtcgatttatcactgtttaaagatcaaatatcggttacgccgggaagctatttcgttacggttgccgtcaatgatattccgctggcaaatggctggcagcttcgctggcgagaaataaataacgccgttcaggtctgtattccccccgagctggtcgatacctttgcgttgcaggatgacgttcgccacgctttgccggagaaagagggatgcgttgatttctccgccagacccgacatcaaatttacttttgagcaaggcagccagaccctgaaagtgaccatcccccaggcgtggctgcaataccgtgcggttgactggatgccgccatccacctgggacatcggcgtgccgggcgtactgctggattacaatctttttgccagccattatcagcccaatagcggcagcaacaatgacaacgccaatacctatggcaccgccggtgcgaacatgggcgcgtggcggctacgcagcgattaccagtacacgcaaagtcatactgacgcaggctcggagcataatggacgtttttcacgcgtgtatatgttccgacctctgccctcgatcggtgcgaaactgacgttgggtgaaacggatttccagtccgcaatttttgacgcctttacctacaccggcgcatcgctaatcagcgatgaacgtatgctgccatggtcgctgcgcggctatgccccgcagattaccgggatagcgcaaaccaacgccacggtaaccgtaagccttgccgatcgcgtgatttaccagagtaaagtgccgccaggtccttttgttattcaggatcttaaccagtcggttcagggcacgctggacgtcaaagtcacggaagaggatggacgcgtcagcaccttccaggtctcggccgaatccgtaccatttttaacgcgcaagggtcaggtgcgctacaagctcgcggcgggtaaagcgcgccagggcgcctcccatgacgttgaagataacgccttcatgagcggcgaattttcctggggcatgctgtcgcacacctccctgtatggcggtacgctggccgatggcgaccgctatcgttccgtcgctgccgggatcggccagaatatggcctggctgggggcgctctcttttgacgtcacgcaggccaccagccagctgccacaccagcgcagccagacgggttacagctatcgcattaactacagcaagcgtttcgataccaccggcagtcagcttacgctcgccagctaccgctactcagatccacagtttttgagctacgcccgctaccttgattatgacgacggtgaccgccagtcggaaaaacaaaccctgagcgtgacggcaagccagtacatttcggcgttatccctgaacctgtacgtcaatatgctgcgtcagacatggtggaatgattcaccctccacgaccggcagtatcacggcgggctacaactttgatatgggccactggaagaaccttggcgtaaccctgtcctggagtaaaacgcattacgatgagaaagacgaaagtgacgatactcagttctatctctcgctcagcgtaccgctcgatcccgatcatagacttaactatgacctgcgtaaccgcgacacgctgacccataacgtgtcgtggtacgacacgtcggatcgcaataacacctggggcgtttccgcgggcgcggagagcgggaagccagattccggggcgcagttcagcgggaattatcagcattattctgcgtacggcgatcttaatctctccggcagctataaagctgacgaatataactccctcagcgcaagctggagcggttccttcacctcaacggtgaaaggcgccgcgctgcaccggcgcagctacggtaatgaaccccgcgtaatggtcagcaccgacggggtaggcaatatcccgctgaacatgtcgcgagatgagaccaaccgttttggcatcggcgttttaccgtcattctccagctattccccctccagcgtgcagatcaatatgaacaaccttccggatggcgtggacgtggacaaccgcgtcgtgacctcaacctggactgagggggccattggttttcgtcagattgccacgcgtgcaggtcgggacgtggcaggtgttctgcggatgtcatcaggaacgccaccgctcggggcgattgttcgcctggaagcaaacgatttgcaggttgggatggtggccgatgaaggccacgtctggctgggcgccgttgagccagaacagcagtttcgcgtgacatggggcgacaaccaacagtgtcgcttctcgttaccttctcacttagaaaacagtatgcagttgatactgccgtgtcagtaagaaatcatcatgaaattaacgccgattaaaagcctgtgcctgatgctaatcagcacagcatttaccacccatgcggccattaatctggaccgcacgcgcattgtttttccagaaagcgacaaggccagcagcctgaaagtggacaaccagagcaaggctttaccttatctggcgctctcctggattgaagatgaaaaggggcaaaaagaagatatgcactttatggcgcttccccctattcaacgtatcgaagcaggcgcctcgtcgcaggtaagaattgttaaacaagccgctacccgccagctgccaaaagacagggaatcgctgttttatttcaacctgcgtgaagtaccgccaaaaagcaccagcaccagcgaggagcgcagcgtgatgcaggttgccatgcagagccgaattaagctgttctggcgtccggaagcgattcgcaaaaaatctggcgaactgactgaaatgcgaatggaaattaccgccagcgcgaaaggactcacgatccacaaccctacgccgtactacatcacgctggcgtggctgagcaaaaatgccaaaaccatgctgccgggtttcgacagtctgatgattgcgcctttcgccacggcaaccgcctctaccggcgattaccacggtagttattacagcatcggctatatcgacgattacggcgccctaaaaaaagtcgacgtgcagtgcaccggaacggcgctatgtaaacttaccgaacggaaaatcgataaagatgcaaaagctcgctagtttcctgtttatactgctgctttcagcgctgcctttgaaagatgcgctggcgcttaactgctatctgggtggatctggcggccccgtcgaggagacaaaaacgatcaccccttttgcgatacccagcaacgctcaggttggtcaaaaaatatgggagtctgatgacattaaaattccggtgacgtgtgataacaacgtcacgagcaattttgagctggaagatgtctttgcatgggtgaacccttatcctgccgcaaccgatccctattatgaactgggcgtcacctatgaaggcatagattacgatgccacgggccagcccaacggcgtggatacccgccagtgcctggacaacgataacatcaccatttacaccgcggatcaaatccgccagatgggttgggagaatcgcatctgctccggcaatccggatgatatcaatatttcacgcacgttcgtcgcccgattacgacttttcgtgagaattaaggctatgccgccacatggttatatcagttcgctcagcgattacatcgttgtgcagtttgacggtaagggtggcgttaatcagatggccgacgcgaagaacctcaagtatcacatcaacggactgcaaaacattacggtgcttgattgtggagcgacgtttagcattttccctgaaaatcaggagatcgacttcggcgccttcagcgcgcgcgacattgtgaatcagcagacgcgtatgcgcacgttttcaatacgaaccaccaaagtgcaggatgcccagtgctcggacggatttaagatggactcgtcgttttacacaaccgaaacgcttagcgcagacgacaccgcggtactgatagggaatgggttaaagctgcgtattcttaacggaacggagccttacaccttcaaccagtacaaggagtacgccgattttacgggcgatactatgaatgttgagcaaaactacacggctgaactttcacgggaagaagggaaagcgattcagtccgggccgtttgaaaccgtggtactgttcaaaattaactaccactagaaacaaaaaagccgggtttccccggctttttcacatcagcatgtttagctggctttgcgctcgtgcgcccggcggtactcaaccagatcttcaatcgtcaccactggcatattgtgcagtcgcgcaaaggtgatgcactccggcgcgcgcgccatggtgccatcatcgttggtcagttcgcacagcacgcctgcgggtttgaagccagccagcgtcaccagatcgatggtcgcttcggtatgaccaccacgggtcagcacgccgcccggctgcgcgcgcagcgggaagacgtgaccagggcggtgcagatcggatggtttcgcaccatcagcaatcgctgcacgcacggtagtcaggcggtcagccgccgacacaccggtggttacgccatgcgctgcttcaatggtcacggtgaagccggtaccaaaggcgctggtgttgttttcaaccatcatcggcagatcaagctgcttgcgacggtcttcggtgatgcacaggcatacgatgccgctaccgtgacggatggtcagcgccatctgctcaacggtcatgttctcggcggcaaaaatcatgtcgccttcgttttcacggttttcatcgtcaagcaccatcacaccgcggccttcgcgcagtgcatccagtgcatgctcaacacgttgagttgaagtgccaaaagaggaaagtagcgtctgattcatggtaaaaaaacctcattaactttatggttaccagaatcagggcagtcttaggagcgccgtactagcggcaaaaaaataacgtgagcgggccatgcccgactggatcgttactctctcccatccggactctaaccgtcggccccggaattacaccggatctgctgacctttgagaattcacccaaagcgctcgcgggctttcagcgttaagctgatttaccgccggtggggaatttcgccccgccctgagaataagcgagataactataacgctattgattaccctgggcaatgcataagcttcaaacaattttgtttaacccacggcatgacgcgctacaataggcactaacaccttttcatcaagggaaacgacaatgattgacccaaagaaaattgagcagatcgcgcgtcaggttcatgagtccatgccgaaaggtattcgtgagtttggtgatgacgttgagaagaaaatccgccagacgttgcaggcacagttggttcgccttgatttagtcagccgcgaagagtttgatgtgcagactcaggtgctgctgcgcacccgcgagaaactggcgctgctggaacagcgtctgagcgagctggagagccgcaatgcgccggaagaagtgaagccagcgccagctattccaccggtggatgaccaggcataagtgcggcctgctgtgcccggtggcggctacgccttaccgggcctggatgaacgcgtaggtcgggtaaggcgcagccgccatccgacataaaaaaacgggcctgttggcccgttttttactgactgtctttctggatcttcttaatgatgttggtggttgaacacccgtcctcaaagttgagcaccatcacttcaccgccatttgcccagacctcttcgctacctgcgatttgctctggtttgtaatcaccgcccttcaccagcaggtcaggcagaattccggcaatcaggcgctgcggggtgtcttcttcaaatgagaccacccagtccaccgcttccagcgcgccgagcacgatcatacgctgctccagcgggttcaccggacgcgtttcacccttcagacgtttggttgaggcatcgctgttgaccgccacaatcagacgatcgcccagcttgcgcgcattcgccagatacgagacatgacccgcatgcaggatgtcgaacacaccgttagtcatcactactttttcaccgcgtttgcgcgcggcagcaacggccactttcagctcgtcttcggtcatgacgccaaagccggtatccgcacgcccacgcaccgcgttttccagctcgattggcgaaacggtggaggtcccgagtttaccgacgaccacgcccgccgcggcgttcgcgaagtagcacgcttcttccagggagttacccgccgccagcgtcgccgccagcacgccaatcaccgtatcaccggcaccggtcacgtcgtacacttcctgcgcctgggttggcatatgcagcggcgccttgcccggttgcagcagcgtcatgccctgctcggaacgggtcaccagcagcgcagacagctcgaaatcagcgatgattttcatgccgcgctcaaccagctcttcttcagttttgcacttgcccgccaccgcttcgaattcagagaggtttggcgtcagcagggttgcgccgcgatagcgctcaaaatcggtgcctttcggatcgatcagcaccggtacgctggctttacgcgccagctggatcatggtctgcacgctcgccagcgcgcctttggcataatcagacagcaccagcgcgccgatattgcccagcgcctggctaatacgctcgtgcagcggctcaggatcaacgccttcgaatccttcttcgaaatcgaggcggatcagctgctggttacgcgacaggacgcgcagcttggtgatggttgggtgggtcggaacagaaacgaagtcgcacttcacgttcacgtccgccagcgactgactcagggcacgcgccgcatcgtcaatgccggtcaggcccaccagacgcgaatgcgcgcccagcgaggctatgttcatcgccacgtttgccgcgccgcctggacgctcttcaatggtgtcgaccttaactaccggcaccggcgcttccggagagatacggctggtcggcccataccagtagcgatccaacatcacatcaccgacaaccataactccagcacgttcaaactctggcagtgttactttcattcctgactccagaaagattcacaatttgcgcgcgataatatcacacttgttttgttacgcacggttccaccagccacttctgccagcttgtggtcacctgcgcgcgttcatcggcgaaacagtccagcgccatatggcccggctgttcctgtaaggccagatggtgcaactcatcacgcagcgtggtgtaggcgcgggttaatgcctgcgcctcctgctcatccataatgtcgttctgcgccagcagttccagtatgcgcacgttatccgaccagcgggtcagcttcggcttatcgtgcgcgtgcagtagcaccaggtactgagtgataaactcgatatcggtaatgccgccttcatcggctttaatatcaaagcgatcgcgatgtttgttgccaaggtgcgcgcgcatcttctctcgcatttcccgcacttcggtttgcagcgtactgccctcgcgcggggtcgtcatgaccgccttgcggatcgcatcgaactgcgttttgagctgcggatcgccatacaccacgcgggcgcgcaccagcgcctgatgctcccacgtccaggcttcgttcttctgatagtcggcgaaagcctccgtcgaggtgaccagcatgcctgccgcgccggacgggcgcagacgcgcatccacttcatacagaatgccggatgaggtgcgggtgctgaacaggtgcataatgcgctgggccagacgcaggtagaactgccgcccgtcaatctcacgttcgccgtcggtcatgacgtctgccggacagtcgtggaggaaaatcagatccagatcggagctgtagcccagctcccagccgcccagcttgccgtaacccaccaccgcaaaaccgcggccttcgcgctctgcaaggtgtttcggctgcccgtagcgggccaccatctgcacccacgcctgatggacaaccgcgtcgatgatcgcttccgccagccaggttaagtgatcgctcactttcattaccggcagggtaccggcgatatctgccgccgccacgcgcagcatctgcgcctgcttaaactgacgcagcgcctcaagctgttgctcttcgtcctcttccggtacgcgcagcagatactgacgcagctcgtcgcggtaggcatccgtcgccgtaggctgatacagcgtattcgggtcgagcagttcgtccagcagcagcggataacgcgccagcttgttcgccaccatcggcgaggcggcgcagagggaaatcaggtgcttcagcgcgccgggaaactcgcttaacagttcaaggtaagtggtacgcgtgacgatcccgctcagcagcggcatcatgcgcgacagcggcaccggcgcatcctcgcgggagcagacatcgctcagcagatgcggcatcagatgatccagcacctgacgaccgcgtgggccaatggcgcgtttgttcagttcgaagcggaaatcggcaatcagcgccaccacgcgatggcgggcatcgtcgcttaagtgcgccagcaccggcgtggtgtcatcttcctggagcgcgtcctgccacagctcgcgccagtgctcggagagcgcatcgtcctgcgattcgctttcgtcgtcgccgatcagatcgttaaagatgcggcgcacgcccgccatatgcgcttccagccgttgcgtcagcgccgcccagtcatccacccgcatcccccaggccagacgcgcccggttcagctcgtcgcccggtaacgtctgggtctgttcgtcgttgatactttgcagcaaattttccagacgacgcaggaagagataagagtcacgcagcgtttgcgcatcaccttccggcagcagatgcagctgctcgatagcgctcagcgtcggcagcagcgagcgggattgcagagaaggttcacgcccgccgcgtatcagctggaagacctggacgataaattcgatctcacgaataccgcccgcgccgagcttgatgttgtctttcaggccacggcgacgcacctcgcgggcaatcatccctttcatatttcgcagggactggatcacgctgaagtcgatgtagcggcggaacacaaacgggcgcagcatggcgcgcagctcgttggcccaggcatcgtcgctgtcacccatgatccgcgctttgaccatcgcgtaacgctcccagtcgcgaccctgctcctggtaataatcttccagcgcggcaaagctcagcaccagcggaccgctgtcgccaaacggacgcaaacgcatatccacgcggtagacaaaaccatcctgggtgggctgatccagtgccttaatcagccgctgccccaggcgagtaaagaactgggcgttgtccagctcgcgacgaccgccgcgcgtggagccgttctccggccaggcaaaaatcaggtcgatgtctgaggagaaattaagctcgcagccgcccagcttgcccatccccagaatcaacagcggttgcggaaccccgtcttggctgcacggcgtgccccactctttacagcaggcgacgtagagccagtcccgcgcggcgacaatcaacgtctgcgccagctcgctcaactgctgcaaggtactctcttcgctcaccagctccagcgcctgcgcccaggcaatgcgtaccatcacccggcggcggaactgacgcagtacgcgcatcagcgtggcttcgtctgccacctctgccagcgcggtttgcagccagccagcataatgccgccactcgtcagcctgcggcggcgcgctttccagctctgccagccaatccgggttggcgctgacgctctcctgcacaaaatcactgaacgtgagcacgcttttcgcctgctcgcttaacgatgacgcgggtaacgactcaggcaggcgttcgcaaacggtctgccagtgctgctgtaactgcgaagaaagcggcatatcaggggttccttgccagaattaacgttttccgctgtgcagccagtacggatcctgcgaaatggcctcgttgcggaaatgctcgatttcgatctgctgacgggtctcgatggcatgcttcagcccctgccagttctccagccaggcctgcgccttaacgccctcatacgcacctgacagcagcaacatgctgtcgatgttacgcgccaggcggggaagctgatcgccatactggtcgcccagcggatgcgcaaaggtggttctcagctcggccgcgtgacgggagaggtggatatccgcaaaacgtttgaagttttccgcaattttggtctgccctttcgcatcgaggaacgtgcgccagccgcgcgtcaccagaaactcggtcagcgccagtttcgcgccggcgttttgcgggctgtagatcaccgtttgtgccgacannnnnnnnnnnnnnnnnnnnnnnnnnnnnnnnnnnnnnnnnnnnnnnnnnnnnnnnnnnnnnnnnnnnnnnnnnnnnnnnnnnnnnnnnnnnnnnnnnnnnnnnnnnnnnnnnnnnnnnnnnnnnnnnnnnnnnnnnnnnnnnnnnnnnnnnnnnnnnnnnnnnnnnnnnnnnnnnnnnnnnnnnnnnnnnnnnnnnnnnnnnnnnnnnnnnnnncgtcagggtatgacgcaccagccccatagcggccagcacctgttttttggcatttttcacgttacgcgcccacagctcctcgtggtactgccactgagagagcgccagctccagcgccgcttccatgccctgctcaacggaggctttcggcacaacgcgcagaatcggggtttctcgcagcacgcgcggcgcattcccggcggccaggtgatagccgcgcgccgctttactcaggctgccctgacgcaggccaggctggttcaccagcttgtgcgccagcttcagcacgtcgctcgcctcgccttccagcagttcgagttccaattcgcagatcggctcctgctcttcacccgccttaatttcaccccgatcgaacgcgatctcaatgcggctcttgccttccgtcaccagccatttttcgcgccagaaatcggtgctgaacagcggttgcgcctctgccgacagcgttgcgggcagcgtcccttccggccacacttccgccggaaaacgatccagctcaagttctggcttactgatgtcgatattgtattccggacgctggtgcaaaccgcccaccacgcgaccggcgattttcatcgtcatctcgtagcgcccgttcgcaccccggatgcgcaggcccatatcgtggttgcgcagccagttgtccggcgtttcgtaatagatgttgagcagctgtacgggttcatggtgctcgccggacagcgtattcagatgctggcggagcgcgtcagcgctgtctttttcgacgataaactttaattcgatctcttgtgccatagccttgtacttttgcgtgcgtcacagacgcgtcgatgaaggcgaacttcctcgccatttgtttgtcagtacatagtattttgcgccaaattgccacgcaatgagcaatttgacgggcgtaaaagtttaaagcgatggaaatcatgacacagatgattccgattgatgatgaatcctttgcgtagcgacactgataccactactatcgttccactttttatgaaaataacgactgatatgcttaaattacgcctgattggacttactttactcgcttttagcgccgcaaccgcggtccacgctgaagagaaacgttacgtttctgatgaactgaatacctgggtacgcagcggccctggagacaattatcgcctcgtgggtacggtaaatgccggcgaggaagtgactctgctgcaaaccaatgcagacaccaactacggtcaggttcgtgacagctctggccgcacctcatggatcccgctgaaagagctgagcacggtgccaagcctgcgcacccgcgtgccggatctggaaaatcaggtgaaaaccctgaccgataagctgaacaacattgacggcacctggaaccagcgcaccgcagagatgcagcagaaagtggcgcaaagcgacagcgtgatcgccggtctgaaagacgaaaatcagaagctgaaaaatgagctgatcgtcgcgcagaagaaagtgaacgccgcgaatctacagctggatgacaaacaacgcaccatcatcatgcagtggtttatgtatggcggcggagtgctgggcgtcggtctggtgctgggtctggtgcttcctcaccttatcccaagccgtaaacgtaaagaccgctggatgaactaactcgtcttctctgccacacttacgtatcatcttgcgaaaagagaaaacgggagtgttggcgtgaagagttatctggtcggtggtgcggtacgtgatgcgttattaggtctgccggtcaaagataaagactgggtcgtggtcggtgccacgcccgaagcgatgattgacgcgggctaccagcaggtaggccgcgattttcctgtgttcctccatccgaaaagccgggaagagtacgccctggcgcgtaccgaacggaaatccggttccggttataccggcttcacctgctatgccgcgccggatgtgacgctggagcaggacttactgcgccgcgatctcaccattaatgccctggcgcaggacgaaaacggccatattatcgatgtctacggcggccagaacgatctgcgtgaccgtcttttacgccatatctcccccgccttttctgaagatccgttacgcgtactgcgcgtggcgcgttttgccgcccgttatgcccatctcagcttccgcatcgccgacgagacgatggcgctgatgacggccatgaccgacgcgggcgagctggaacacctgacgccagaacgcgtctggaaagagaccgaaaacgccctgactacccgtaatccgcaggtctttttccaggttctgcgcgactgcggggcgctgaaagtgctgttcccggaaatagatgcgctgtttggcgtgcccgccccggcgaaatggcacccggaaattgataccggcattcacaccctgatgacgctgagcatggccgccatgctcagcccggaggtggacgtgcgcttttctaccctctgccatgacctcggcaaagggttaacgccaaaggagttgtggccacgccaccacgggcacggtccggctggcgtgaagctggttgaagggctttgccagcgcctgcgcgtgccgaatgacattcgcgatctggcaaaactggtcgccgagtttcacgacctgatccacaccttcccgatcctgaaacccgccaccatcgtcaggctgtttgataacatcgacgcctggcgcaaaccgcagcgcgtggagcaaattgcgctgaccagcgaagccgacgtgcgcggccgcaccgggtttgaagcgtccgattatccgcagggacgtttgctgcgtgaggcgtgggacgtggcgaaagcggtgccaacgaaagaggtggtggaggcaggatttaaaggcccggcgatccgcgaagagctgacgaagcggcggattgatgcggttgcagcgtggaaggaaaaacgttgccctcagccgaaagactgagggcggtcggtcatcagaagaagaccacgtacacggcagccgcgacgataaagcggtagatcgcgaacggaataaacgaaatacgcttaatcagttgcaggaaggttttgatggcgatcaacgccacaataaaggcggtgataaagcccacggcgaacatcggaatgtcgcccacggtcaggaagccgatgcttttgtagagatccagcgcggtggcgcccatcatcatcggcaccgccagcaggaacgagaactcagacgccgcgtaacggctcacgcccatcagcatcccgccggaaatggttgcccctgaacgggagaagcccggccacagcgccagacactggaagcagccaatcataaacgcctggcgatacgtcatatcgtccagaccttccgcacgcggggtttttggcttcagcacttcggcggcaatcagcaggaagccgccgacaaccagcgcgtacatcacgttaatcgggttgaagagcgatttaatggtgtcgtggaacaccagccccagcaccaccgccgggatcatcccgagcagaatatgaatcagcgtcaggcgccctttgccctctccttcacgctgcggcaaacgcccgaagtggataccgatcagaccaaacagacgtcgccagaacatcacgaccaccgccaggatagagcccagttggatcaccacctcaaacgtctttgcggtatcgccttcaaagcccaggagatggccaacgataatcatatggcccgtactggacaccggcaaaaactccgtcaatccttcgaccacacccagtattgccgccaccagcagcgagtgcatatcgctcatctataaacccctaaaaagatataaaaaaacggtgtcccacgcggacaaccgtgaaagatacagctttaagaccgatataacctaaaatggtttagctattatgacgttaaatctttcctttcagatttgtgccacgctcgataatcacgcccacattggcggcgcgcgccaccgctcccggcttgcttagcttaatgcgcacccacggggagttaaatttgctcagcagcaggtctgctacctcttccgccacacgttctaccagcgcaaaacgttgcccttccacatgggcgatgaccgtttcactgatgtcggcgtagctcagacagtcattcacatcatcgctttttgctgacttgcggttgtcccagcccatttcgatatcgaacaccagtttctgctcgatggtctgttcccagtcgtaaacaccaattgtggtgattaccgaaagttgctctataaatacaatatccatcacgacctgcctgctttttggctaaaccggataccacttccggcgaattatgcgtattatccacagatgctgagaatacagatacattttcaaaacggaacagcgttatgagtgcaatcgcgcctggaatgattatcctcgcctacctttgcggctcaatctccagcgccattctggtctgccgcatcgccgggttgcctgacccgcgtgaaagtggttccgggaatccgggggcgaccaatgtactacgaattggcggcaagggagcagccgtagcggttttgatttttgatgttctgaaaggaatgcttcccgtctggggcgcgtatgcgctcggcgtcacacccttctggctggggctgattgccatcgccgcctgcgtcggccacatctggcccgttttctttggttttaaaggcggtaaaggcgttgccaccgcgtttggcgcgattgcgccgatcggctgggatctcaccggcgtgatggcgggcacctggctgctgaccattctgctgagcggttattcgtcgctgggcgccatcgtcagcgcactgatcgccccgttttatgtctggtggtttaaaccgcagtttaccttcccggtgtcgatgctctcgtgtctgatcctgttgcgccaccacgacaacattcagcgcctgtggcggcgtaaggaaacgaagatctggacgaagctcaggcgtaaaaagaaagacgctcagtaaaccgttcgttatgccttataaccaaatgtgatttttgtcaccttctgcctgtggtaactgttagagacacaacacaaccacacaaaaagaaaatggcagaaatcacagattcaactccccttccaacggcaggaaataccccggatggcgacatcaagtgggtgcgtagcgcatcggacgtttcacgtctcgttaatgacggctctcagggccgggccaatgcccgcatcgtgatcggtatcgcactcgggggaattttcctcgatgcctacgatctcggcgcgctggcattcggcatcaaagacatcacccgcgaatttaacctgacgcccgccggtaccggcatggtggcctcggcgattacctttggcgcgattgtcggggcgctgctcggcggctatcttacggataaaatcgggcgctaccgcgtctttatggccgacatggtgttctttgtcgttgccgctatcgcctgtgcgctggccccgaacgaatatgtgcttgcgggcgcgcgctttgtgatgggtcttggcgttgggatcgaccttcccgtcgcgatggcgtttctcagcgagttcgccaggctgaaaggcccggggaataaagcctccagcgtcgcaatgtggtgccccacctggtacgcggccatcagcatctcttatcttctggtgctcttcttttacgccgtgctgccggaaagccacagcgactggctctggcgtctgatccttggctttggcgcggtgcccgcgctggtgattatcgccatccgcagccgctatatgagcgaatccccggtctgggcggcgaatcagggcaatctgaaggaggcggcgtccatcctgcggcagtcttacaatattaatgcccacgtaccgcaggatgcgctcgaccagcccgcgcctgtcgtgaacaaggcaaaatggtcgaactacctgaacctgttccgcggtatctatctgcggcgtaccacgctcgccacgctgctgtcagtggtctcctcgttcgcctataacgccgtagcctttggcctgccggtgatcatctccagcttctttgtgcagtcgatgctgacgaccattctgatctcgctggcgcttaacctgctgttcgcgtttgtcggcgggctgctggcggtgcgctatgttccgcgcttcggcgcatggcggatgtctctggcgggttatgcgtgccagcttacggcactgctcggcctggcgctgattggccgccctgacggggctacggaaggcgtattcgccgtcgcgatgctggcgctgttcctgtttggtcagggttttggtccaggtgcgcataccatgacgtttgcctccctgagctacccgacctcgctgcgcggcgtgggcgtggggcttaaccagacgctgatgcgcagcagttcaacgctgtcactgtttctgttcccgctgctggtcgcctcgctggataccgccgtgttctgggtgattgcgctggcgccgtttatcggtctggcgtcgctgctggcgatccgctgggagccgtcggggtatgatgtggatgcagaggattatcgctagcctttcttgccgggtggcgctgcgcttacccggcctgcattactgaaaccggctcacatgagccgtttttttatccataagcgactcatatgacagccttcatttccgccagggcatactgaaacgtacccccgatagtgtggaaatggaagcaccatgttagcaactcaggtcactgataattcatacaaaggctggcaggcctcgcttgccctccagttttgtcatacccctgagaaaaccctcctccattccgcgcgtcacagcgggccgctcaccgttcagcgtccgttttatcccgaaggggaaacctgccacctttacctgctgcacccgccaggcggaattgtgggcggagatacgctggatatttccgtgcggctcgacgccaaaagccatgccctcatcaccatgcccggcgccagtaagttctatcgcagcaacggcccgctggcctgcctcagtcagcatttttacctcgacgaagaggccacgctggagtggctgccgcaggacaccattattttccccggcgctaacgccgcgctgcgttccgtctttcacctgcacgccaccagcacgctgctggcgtgggagctgtactgtctgggccgtccggtgataaacgaaaccttcagccacggcacgctggagaaccgccttgaggtgtgggtggatggcgagccgcgtctgattgagcgactgcatctcagcggtggcgatctgacgcccgtcgcggaccatccgtgggtcggcacgctgctgttctatccggcccgggaagcacttctcgacgcggtgcgtgcgcttctcgccccgctggaaaacgttggcggggcgacgctcaccgacgatctgctgtcggtgcgttttctctcccacgacaacctgatttgtcagcgggtgatgcgcgatatctggcagtcgcttcgcccgcttttaacttccaaaaccgcctgttcgccgcgcatctggcaaacataagagaaacgctatggaactgactcccagagaaaaagacaagctgttgctgttcaccgccgcgctggttgccgaacgccgcctcgcgcgcggggtaaagctcaactacccggaatcggtcgcgctgatcagcgcctttattatggaaggcgcgcgcgatggcgaaaccgtcgcctcgctgatggaagccggccgccacgtcctgacgcgcgatcaggtgatggaaggcgtgccggagatgatcccggatatccaggtggaagccacctttccggacggatccaagctcgtcaccgtccacaacccgatcgtgtaaggagcgcgtgatgatcccaggcgaataccggatccagtccggaaacattgctctcaacgtcgggcgcgaaacccgaagtgtgatcgtggaaaaccacggcgacaggccgatccaggtcggatcgcactaccacttttacgaggtcaacccggcgctgaagttcgatcgcgaagccacccgaggttaccggctgaacatcccggccggcactgccgtgcgcttcgagcccggccagaagcgggaagtgacgctggtgcaggtgacgggcgcacagcgcattttcggctttcgcggcgaggtcatgggcgaggtgaaacatggctgagatttcacgccaggcgtatgccgatatgttcggccccactaccggggataaagtgcggctggccgacagcgagctgtggatcgaagtggaagacgatctcacgatctacggcgaagaggttaaattcggcggcggaaaagtgatccgcgacggtatgggacaggggcagatgaccgccgacgactgcgtggatctggtgctcaccaacgcgctaatcgtcgatcactgggggatcgtgaaagcggatatcggcgtaaaagatgggcggatcttcgccatcggcaaagccggaaacccggacattcagcccggcgtgacgatcccgattggcgcggcaacggaggtgatcgccgccgaagggaggattgtcaccgccggcgggatcgacacccacatccactggatctgtccgcagcaggcggaagaggcgctggtgtctggcgtcaccaccatgatcggcggcggcaccgggcctgcggcaggcacaaacgccaccacctgcacaccggggccgtggtatatcgcccgcatgttgcaggcagccgatacgctaccggtgaatattggcctgctgggtaaagggaacggctccaacccggacgcgctgcgcgagcagatcgcggcaggtgccatcgggcttaagatccacgaagactggggcgcgacgcctgcggccatcaactgttcgctggaggtcgctgaagagatggatattcaggtggcgctgcacagcgacacgctgaacgagtccggttttgtcgaagacacgctggccgccatcgccgggcgcaccatccacaccttccacaccgaaggggcgggcggcggccatgcgccggatatcatcaccgcctgcgcgcacccgaatattctgccctcctccaccaacccgacgctgccctacacggtcaacaccatcgacgagcacctggacatgctgatggtttgccatcacctcgacccggatatcgccgaggacgtggcgtttgccgaatcccgcattcgccgggagaccatcgccgccgaagacgtgctgcacgatatcggcgcgttctcgctcacctcgtcagattcacaggcaatgggccgcgtgggggaagtgattatccgcacctggcaggtggcgcaccgcatgaaggtgcagcgcggcgcactgccggaagagaccggcgataacgataacttccgcgtaaagcgctatgtcgccaaatacaccatcaacccggcgctgacccacggcatcgcccatgaggtcggttctattgaggcgggcaagctggcggatctggtggtctggtcccccgccttctttggcgtcaaacccgccaccatcgtcaaaggcgggatgatcgcctgcgcgccgatgggcgacatcaacgcctcgatccccacgccgcagccggtacattaccgcccgatgtttggtgcccttggtgccgcacgccacgccacgcggctgacgtttgtctctcaggctgctgatgccagcggcattccgcaacggctcggactgcaaagcgccaccgcggtggtgagaggctgccggtcggtgaaaaaggccgacatgatccacaacgatttacagccgaatatcaccgttgacgcgcaaacctatgaggtacgcgtcgacggcgaattgatcaccagcgaaccggcagaggttttgccgatggcgcaacgctattttctgttttgaggagtcatgatgatctatttaacccaacgcctggaccatgcgcatccgattaccgccagcgtcacgctaccgattgatgtgcgggtaaaaagccgcgcccgcgtggcgctgaacgacggccgcgaagccgggctaatgctgccgcgcggcctgctgctgcgcgggggcgacctgctgactaccgacgatggcagcgaggtgatcgaagtgatcgccgccccggagtcggtttccgtggtgcgctgcgccgacccgttcctgctcgcccgcgcctgttatcacctgggcaatcgtcacgtaccgctgcaaataatgcctggcgaactgcgctaccaccacgaccacgtcctcgacgatatgctgcgtcagttcgggctggaggtgaccttcgccagcctgccgtttgaaccggaagcgggcgcatacaccagcgatgcccacagccatagccactctcacgctcattcacattaaggactcatcatgcgcaagtacttaccgctgttactgctggctttttccgttcccgcgcttgcccatcccggccacgggaccgacagctttcaggcaggatttctccatccgctgaccgggctggatcacctgctgatgctgacgggggctggcgtgctctccgccctgagcggccgcaagctgctgttgccgttagcgacgctcggcatgatgcttgctggtgccgttgcgggcagcctgctcggcggctttagcggcatggagatgctgattatcgcctcgctggcggtctgcggcgtgatgatgtttaagactgaaaatcgcctgctgctggcggtgccagccctggcgatgttccacggctgggcgcacggcgtggagatgtccggccacagcttctggctcttcaccagcgggtttatgttagccagcgccacggtgctgtgtgccagcttcgcggcagggctgctgctgcgccgtcacgacggcctgcgtaaaaccttcggcggcgggctgatcgtctccgccctgctggcgctgatgagctgatggagcacgcccgccagcggctgcgcctgatgcagctctccagcagtagcctgccggtcggatcgtttacctggtcgcaggggctggagtgggccgttgaggccgggtgggtcacggacgctgaggccttcaggcgctggcagatccagcagatggagcagagctttttctgcgtcgaccttccgctgtttatccgcctgtatcgtgcctgcgagaagcaggacgtcgcgacagcaaaacgctggacggcatacctgctcgcctgccgggaaacgcgcgagctgcgcgatgaagaacgcaaccgtggcgcggcctttacgcgcctgattaaaagctgggaacccgcctgcccgccagaatggctgccgctgttgatgcgaagccagctcggcggcatggcgtggctcggcgtgcgctggggcattaacgcgcgcgagctggcgctgagcctgggctacagctggatagagagcgcggtgatggcgggcgtcaagctggtaccgtttgggcagcaggccgcacaacagctgattatcgacctgagcgaccattttgccgccgggtttgaacaggcatttttacgtggcgacgacgcgctgggggccgctacgccgctgtcggccatcgcctccgcgcgccatgaaacccaatattcacgactattccgttcctgaggagtcaacatggctgattacaaacatcccctgcgcgttggcgtgggcggcccggtagggtcgggcaaaaccgccctgctggaagcgctctgcaaggcgatgcgcgacacctatcacctggcggtggtgaccaacgatatctacaccaaagaggatcagcgcatcctgaccgaggcgggtgcgctggagccagagcgcatcgtgggggtggaaacgggcggctgtccgcacaccgccatccgcgaagatgcctcaatgaacctggcggcggtggaagcactcagcgagaagttcggcaatctggatctgatcttcgtggaaagcggcggggataacctgagcgcgaccttcagcccggagctggcggacctcaccatctacgtcatcgacgtggccgaaggggaaaaaatcccgcgcaagggcgggccggggatcaccaaatccgattttctggtgatcaacaaaaccgacctcgcgccgtacgtgggggcgtcgctggaggtaatggagcgcgacactaatcgcatgcgcggcgagcgtccgtggacgtttaccaacctgaaagcgggtgacggtttagcgacgattattgcgtttctggaagagaaaggaatgttgcgggtgtagggtggtttattgcacgttagcacacgtggatcttgtaggcccggtaagcgcagcgccaccgggcaaagaaactcacgcctcaggcagttccgccagcggccagcgcggacgcacagacacgctcaggtcagccgttgcgccggcgttcagacgcaccatcccggcgtaggcgatcatcgccccgttatcggtgcaaaattcaggacgcgcgtagaacacttccccgcgacgcttttgcatcatctcagcaagcttcgcacgcagcgtacggttagcgctcacgccgcccgccatcaccagacgcttaaagccggtctgatccagcgcgcgcttgcacttgatcatcagcgtatccaccaccgcgtcttcgaacgcacgggcgatatcggcgcgggtctgctcgctgtcatcgttattacggatcgtattcgccgcgaaagttttcaggccagagaagctgaaatccagccccggacggtcggtcatcggccgcgggaagacaaagcgcccttccgttccctgcgacgccattttcgacagcatcgggccacccgggtaatccagccccagcagcttggcggttttatcgaaggcttcaccggcagcatcgtcgatcgactcgcccagcagcgcgtacttgccaatgcccgttacgctaatcagttgggtatgcccaccggaaaccagcagcgccacaaacgggaactctggcggattgtcttccagcatcggcgccagaagatgcccttccatatggtgaaccggaatggccggaacatcccacgcgaaggccagcgaacgccctaccgttgcgccgaccagcagcgcgccgaccaggcccggccctgcggtataggccacggcatcaatatcttttgcactcaacccggcctctttaagcgccgcctgaatcaggggaaccgttttacgcacgtggtcacgagaggccagttcaggcacgacgccgccgtaatcagcgtgcaatttcacctgactatacagctggttggccagaagccctttttcgtcgtcgtaaatcgcgatgccggtttcatcgcaggatgtttcaatacccagtacacgcatgacttgttttacctcgtttcaataccgcgcagtgtagagcctgggcggattgttgtaaaactttgttcgccccaggaagaagcctcgtgtatactcctcacccttattaaagtccctttcaaaatcgcatcggtgctttacaaagcagcagcatttgcagtaaaattccgcaccattttgaaataagctggcgttgatgccagcggcaaaccgaatttattaaaggtgagagttacatgccggtaattaaagtacgtgaaaacgagccgttcgacgtagcactgcgtcgcttcaaacgttcatgcgagaaagcaggtgttctggctgaagttcgtcgtcgtgagttttatgaaaaaccaacgaccgaacgtaagcgcgctaaagcttccgctgtgaaacgtcacgcgaagaaactggctcgcgaaaacgcacgccgtactcgtctgtactaatctgttgagggccacagccctcaattgacagacagagttgtagtcgtaaggccgtgcttccggaaggaatgcgcggcttgttttcgtttataagtcgcttaaatttttggnnnnnnnnnnnnnnnnnnnnnnnnnnnnnnnnnnnnnnnnnnnnnnnnnnnnnnnnnnnnnnnnnnnnnnnnnnnnnnnnnnnnnnnnnnnnnnnnnnnnnnnnnnnnnnnnnnnnnnnnnnnnnnnnnnnnnnnnnnnnnnnnnnnnnnnnnnnnnnnnnnnnnnnnnnnnnnnnnnnnnnnnnnnnnnnnnnnnnnnnnnnnnnnnnnnnnnnnnnnnnnnnnnnnnnnnnnnnnnnnnnnnnnnnnnnnnnnnnnnnnnnnnnnnnnnnnnnnnnnnnnnnnnnnnnnnnnnnnnnnnnnnnnnnnnnnnnnnnnnnnnnnnnnnnnnnnnnnnnnnnnnnnnnnnnnnnnnnnnnnnnnnnnnnnnnnnnnnnnnnnnnnnnnnnnnnnnnnnnnnnnnnnnnnnnnnnnnnnnnnnnnnnnnnnnnnnnnnnnnnnnnnnnnnnnnnnnnnnnnnnnnnnnnnnnnnnnnnnnnnnnnnnnnnnnnnnnnnnnnnnnnnnnnnnnnnnnnnnnnnnnnnnnnnnnnnnnnnnnnnnnnnnnnnnnnnnnnnnnnnnnnnnnnnnnnnnnnnnnnnnnnnnnnnnnnnnnnnnnnnnnnnnnnnnnnnnnnnnnnnnnnnnnnnnnnnnnnnnnnnnnnnnnnnnnnnnnnnnnnnnnnnnnnnnnnnnnnnnnnnnnnnnnnnnnnnnnnnnnnnnnnnnnnnnnnnnnnnnnnnnnnnnnnnnnnnnnnnnnnnnnnnnnnnnnnnnnnnnnnnnnnnnnnnnnnnnnnnnnnnnnnnnnnnnnnnnnnnnnnnnnnnnnnnnnnnnnnnnnnnnnnnnnnnnnnnnnnnnnnnnnnnnnnnnnnnnnnnnnnnnnnnnnnnnnnnnnnnnnnnnnnnnnnnnnnnnnnnnnnnnnnnnnnnnnnnnnnnnnnnnnnnnnnnngaaaaattgcccggggcttggcttattttcagaattggtcaacacttgtttgtctcagccaggtctgaccaccggacaacttttagagcattatcgcggcacaaaagaggccgctacccttgaaaaactgtcgatgtgggacgatatagcagataaggatatcgcagaaaaaacgttcaccgactcgctcaaccatatgtttgattcgatgcttgagttgcgccaggaagagttgatagctcgcgagcgcacccatggcctgagcagcgaagaacgccgggagctctggatgattaaccaggaactggcgaagaaataaaaaatttaacggcttaagtgccgaatatcgatcgggaagcccccggcagccgcactgagaggcagcggcaaaaatataagtacgccctcgctttaaaggttggcagcccatcgccgacaccaatcaaacgaattaagtgtggataccgtcttatggagcaaaacccgcagtcacagctgaaacttcttgtccaacgcggtaaggagcaaggctatctgacctatgccgaggtcaatgaccatctgccggaagatatcgtcgattcagatcagatcgaagatatcatccaaatgatcaatgacatgggcattcaggtgatggaagaagcaccggatgccgatgatctgttgctggctgaaacctccaacaacactgacgaagatgcggaagaagctgctgcacaggtcctgtccagcgtggaatctgaaatcgggcgtaccactgacccggtccgtatgtacatgcgcgaaatgggtaccgttgaactattgacccgcgaaggcgaaattgacatcgcaaaacgcatcgaagacgggatcaaccaggttcagtgctctgttgccgaatacccggaagcgattacctatctgctggagcagtacgatcgcgtcgaagcggaagaagcgcgtctgtccgatctgatcactggctttgtcgacccgaacgctgaagaagatatggcgccaaccgccactcacgtcggttctgagctgtctcaggaagagatggatgacgacgaagacgaagatgaagaagaagaggacgacagcagcgacgatgacaacagcatcgaccctgaactggcgcgtgagaagtttgccgagctgcgtacccagtacgaagtgacgcgtgacaccatcaaagcgaaaggccgcagccatgccgccgctcaggaagagatcctgaagctgtctgaagtgttcaaacagttccgcctggtgccaaaacagttcgactacctggtgaacagcatgcgcgtgatgatggatcgcgtacgtacccaggaacgtatcatcatgaagctgtgcgttgaacagtgcaaaatgccgaagaagaacttcattaccctcttcaccggcaatgaaaccagcgaaacctggttcaacgccgctatcgcgatgaacaagccgtggtctgaaaagctgcacgacgtgaaagaagacgtacagcgcggcctgcaaaaactgcatcagattgaagaagagaccggcctgaccatcgagcaggtgaaagacatcaaccgtcgtatgtccatcggtgaagcgaaagcccgccgtgctaagaaagagatggttgaagcgaacttacgtctggttatctctatcgccaagaaatacaccaaccgtggcctgcaattcctggatctgattcaggaaggcaacatcggtctgatgaaagcggtagataagtttgaataccgtcgtggttacaagttctccacctatgctacctggtggatccgtcaggcgatcacccgctctatcgcagaccaggcgcgcaccatccgtattccggtgcatatgattgagaccatcaacaaactcaaccgtatctctcgccagatgttgcaggagatgggccgcgagccgacgccggaagagctggctgaacgcatgctgatgccggaagacaagatccgtaaagtgctgaaaatcgctaaagagccaatctccatggaaacgccaatcggtgatgatgaagattcgcatctgggtgatttcatcgaggataccaccctcgagctgccgctggactctgccaccaccgagagcctgcgtgctgccacgcacgacgtgctggctggcctgaccgcccgtgaagccaaagtgctgcgtatgcgtttcggtatcgacatgaacaccgaccacacgctggaagaagtgggtaaacagtttgacgttacccgcgaacgtatccgtcagatcgaagcgaaggcgctgcgtaagctgcgccatccgagccgctctgaagtgctgcgtagcttcctggacgattaatcggtcctgaaatgaaaaagctcccaatcgggagcttttttttgtttattccctctnnnnnnnnnnnnnnnnnnnnnnnnnnnnnnnnnnnnnnnnnnnnnnnnnnnnnnnnnnnnnnnnnnnnnnnnnnnnnnnnnnnnnnnnnnnnnnnnnnnnnnnnnnnnnnnnnnnnnnnnnnnnnnnnnnnnnnnnnnnnnnnnnnnnnnnnnnnnnnnnnnnnnnnnnnnnnnnnnnnnnnnnnnnnnnnnnnnnnnnnnnnnnnnnnnnnnnnnnnnnnnnnnnnnnnnnnnnnnnnnnnnnnnnnnnnnnnnnnnnnnnnnnnnnnnnnnnnnnnnnnnnnnnnnnnnnnnnnnnnnnnnnnnnnnnnnnnnnnnnnnnnnnnnnnnnnnnnnnnnnnnnnnnnnnnnnnnnnnnnnnnnnnnnnnnnnnnnnnnnnnnnnnnnnnnnnnnnnnnnnnnnnnnnnnnnnnnnnnnnnnnnnnnnnnnnnnnnnnnnnnnnnnnnnnnnnnnnnnnnnnnnnnnnnnnnnnnnnnnnnnnnnnnnnnnnnnnnnnnnnnnnnnnnnnnnnnnnnnnnnnnnnnnnnnnnnnnnnnnnnnnnnnnnnnnnnnnnnnnnnnnnnnnnnnnnnnnnnnnnnnnnnnnnnnnnnnnnnnnnnnnnnnnnnnnnnnnnnnnnnnnnnnnnnnnnnnnnnnnnnnnnnnnnnnnnnnnnnnnnnnnnnnnnnnnnnnnnnnnnnnnnnnnnnnnnnnnnnnnnnnnnnnnnnnnnnnnnnnnnnnnnnnnnnnnnnnnnnnnnnnnnnnnnnnnnnnnnnnnnnnnnnnnnnnnnnnnnnnnnnnnnnnnnnnnnnnnnnnnnnnnnnnnnnnnnnnnnnnnnnnataattaagccactcaaaagagtggtttttttgttaacggaattgcgggtgtccccttttcgtcccctcactattttttgcaggcatccgccaggccgcattctgcatagcagtgcatgatttttttattatccgcctctgatttttgccgctccgtatgaaagcaagtagccgactaacaatgcgccaacacacccggcgaatttcatccatatgctttcaaaccagaagaatgaccccatagcaaaaatcacagccagaaaggtgatggttccctcaattgcgtgggacattaacgattttacaaatttcattctgtattcctttgcaatcaatagggtgtccttcaatgaacaccagttaaggctctaactgctgttcaacgagaaagtagaccatatccagattctcttttgacaccctggcgtatgtagagggatatttggctttcatccgtcttgacgctctggctgactcttcgatgattccctgaaacatcactacgtttaacgctactgaagcgctgagccgaataaaatgcttgtacgcctggtcaatcaccacgtctgacgcgcagtgatatccccgcctcgcctgcgcgcttaacgggtcgcttttaatgctatacctcaacgctacagtcttaggctgatcagcaaaaactcttactcacaatcacatgcagaatcatgcaagtgcaagtgcaagtgcaagtgcaagtgcaagtgcattgagtatgagatctttcttgaaaattagaagtgtaataacatggttcctaagtacttctcctatatgcacaggaactctccatgagaaaagaaatcgcttttgcgaatcttaaagaaagccgcgttttagaatgcaaactggcgaatggaaaaaacggtaaaggggcattgccaattgatttttgggaaagttatagcgctatggcgaattcttgcggaggcttggttttattgggcgttcgagagaaaaatggtgtgtttacaccagaagggattgaagatattgaaagagtgaaaacagacctctttaatactttaaacaacccccaaaaagtaagctgcaacctcctaaatgataatgatgtatacgctgaggaagtagatggcaaaaatattttattcatagaaattcctcaagcaaatagaaaacaaagacctgtctacataaacaacaaccctttaacaggaacatatatacgacttcatgaaggagatagaaaatgtactagtgagcaagttaaatccatgttagcagagcaaacgactgacactctagatgataggatctttgaaggctacacaattgatgacttagataaagccagcattcaaatttatagaaaaatgttggctgatagcaaaccgagtcatgtatggttggagttggatgatttcgatttcattactgcactgaagggatggaaaaaggatagaaaaactaaaatagaaggtctcactttagcgggaatcttgatgtttgggaaatggtccacaattcaagaagccttgcctaattatttcatagaatatcaggagattactgaagacaatcggtgggatgatagattatttccggatggcagctggacaggtaatttatttgaattttacagaaaggtataccgaaaattgattgaagatcttaaaatccccttccaaatcaatcaaggaattagaaaagatgacagccctgttcatgttgcactaagagaagctttagtgaatagcctagttcatgctgactataatggtcactcccccataaaaatcacaaaacaaaatggattattttctttccgtaatccaggaactatgcgagtacccattagcattgctaaagtcggaggtgaaagtgattgcaggaataaatatttacatcaaatgtttctaatgatcggccttggtgaaagagccggatcaggtttaccaaaaataattagcggctggcgttcacaacattggtcagagccaaaactaattgaaaactttgaaattaacaatacaatactcgaacttggaaccaatgatttcattcctgaagagaccatgtctacaatacgaggtatttgtggtgataagtttgacaccctgacaaaattagataggataattttagctacagccgcagatgaaaacattgtaagccatgaaagaatcaaaagtttaacgatggaaacaacgcgtagtattacattatcactttcaaaacttagtgcgcttgaaatttttgtaattccgatggagtacaaaaacacaaacgttattttcttccaacttactcgcctataagacctgatgatgcaaaaggacatcaactgttacagttagcattcatccacccccctaaagatattgccttaactgaaatcagtaataatgaagctccgttatacgatttaaacgaagaatttaatgaatatttcacccgcaaggatgcatataaatacattgtacaaatcagcatattagcaacggaacttcaaaatgctacaaaaacactaagcaaaagactttttatcgcaaaaaaacttttaacccagaatagtaaagaacagaaaaataacaatagttcagagttattttataacgtagtatccgaatcacttgatgaatataatgactcacctcaaaggatggggcaacagcagtaccttagtactgagcaacaacaacaccttcgtactgagcaacaacaacaccttagtactgagcaacaacagtaccttagtactgagcaacaacaacaccttaatactgagcaacaccaccttagtactgagcaacaacagcaccttagtactgagcaacaacagcaccttagtactgagcaacaacatcaccttagtactgagcaacaacagcaccttagtactgagcaacaacagcaccttagtactgagcaacaacagcaccctagtgctgagcaacatcagcaccctagtacttccgttagtatcaagcagcccctacagagggttgaaaccccttatcaggaaaaaaggcacaaagaggttcttaaagagattggcttgaatactgatctattaagtatgactgaaagtgatttattattagaaatcaatgaattagagtccagcctcgcaacagctgatgatacatacaggaatatgctttgcaacgaaaatggtagaccaaaaactctctatgaaatgatcaaagggaaaccttttgaatgtgaaattgataatccagaggatcaggtaaaaactaaagcagattttttacgattaacacaagaaatagcttggaaagaattaatggatttatcatcagatataagagagggaagtaaaagaggggttaaaaaatcaaccataatgagggtgatcgttacattagctctaagaggatatttaacagttagagactttagtgaattgcttggccgtaatcccaattccctcagaagagactatctggcaccgttagttaaagaaaaaatattaaccttagcttatccttcaacaccaacacatgcctatcaaggatataaaagtgacatttctaagctatccatagacttgcaaaaattcgacaattagcacctcccccctctcaaataaattagaggggggtattttaagcaagaatatggcccaagcaatgatgccctggttcttgatgaagagtatcccttcgctgtacgaatgcgcacttgtttagattcgccagaaatacttgagattctttctaacgacctagaagttgatacttcgttatggtttggagaagaagaaaataacgttcttgaaataacgagccaaaaccagtgccaggcagttcctccattgcagaacttttatgggcttgacgaaaatactccttttgaaaacggactggctaagtggcggtagaaatggctctaagtggcccttggttggtcaacgatggccctttatgtccatgatttgtaaagcaacctattgattttcggttgttgttttaggaactaataatcgcttggtcgctggttcaagtccagcagggggccaccaaattttagctttagaatcatccagttaaaccactcgattgagtggcttttttgtaagtaatccaccacacgtagcccggcctaccgcttcccctcacaaaccctaaaaactaaagaaatcccccatcgcgccgatcatcatccgtgtgtattatttcctgtagcttttacaacaactaaccttaactcaaatacttaagcgccagagcgaaaggcatcatgagcacaccgatcaaacggctagaaatcattaaaaatgccattgagctggaagatgacgacatcatccggagccagctgaaacgtctcaaagaggaagcctttgacgatgaactcctgtccatcgtcgcggcgcttgagcagaaaaattataccgcagcccttcgcgctatcaccgcctggctgcaaagccagcgcgccgttaccccgtggcgtgacccacagctggcggccagcaagctggagctgaaagccctggaagagcgtctgcgcgatctgattgatcgccgtaacgcccgggtacagcagctagatgagttcaacgatctctatttctcccgcctcgggccgttgatgcagcagatcctcgccctgcgtaaaacgctggcggagcttaacctgcgtcgtcagcaggcggagacgcgtcgtcgggaagaggattaccgccgctgccaggactatatggcgcaggccgtagaggttctgacaacgctcacccggcgctggcgagatctgcctgcggattccgttcaggcggcagaggcgcgcaaacatcttcagcagcaaagcaatctgattgccaacctgctggccgaagcaatggagctggagaccggtttaacgcgtgaagaagagccggcacgtcaggcgcgcgatgaggccaacgaagagtacaagaagtatcgcgaacagcatcatgatgccgaagttcgcctgcgtaaaggcaaggatctctctgaagaggatcggaacgagctgaagcggctctggcgtcaggcgagcaagctatgccacccggatctggttgccgatgatttaaaagaggaggccaacaggatgatggtgcaactcaaccaggccaaacagcgcggcgacgtgaaggccattcgctcgctggtcgcccgtctgcaacaaggattcgaaccgatgatggcaagcgacaggctgaacgacctggaacgtattcgtaaaaagatggcgcaggtgcgtgagcaaatcgacaccctggtgaacgagctggcagagctggagaaggaagagtcctggctgctcgtctcgtcgctcagcaatatggaagcctactttgcccagcaggagaaagcgctgaaagaggtatgcgcctcgctcgaacatcaggtgagcgaagcgcagctggatcccgctgcctgattatttggcgtgccagtacgcgctggcacgcaccagctgcgggtcaattgcgtcgttttcaaactgacggctcaggcgtttcaccaccttcccctccccggtcagccagataaagtaatcctcttccggcacggccagcgcggcaagatggtcggccaccgcctgctcgttgtggccgataacccaggtgatgttgaacccgctcaggtgcgccagatagtcctcatacgccgcatcgcccacggtgacaatggcgtggatcgccgggcgaacaggcagttttgcgatgccttctaaacggcggcgcagcgcgggcatccccgactcgtcgcacacgtacagctgccaggcgtaatcttccggcaccaccagcgaaccgcgcggcccgccgatggtcagcttgtcgcccaccttagcctctaccgcccagttgctggcaatgccgccatcatgaacgaagaaatcgagcgccagctcatgtttttcgtcatcgtacagcggggtatagtcacgtgcctgcggacgcgcgccgtcgccccagtcgatgccttcatcggtcaccacaggcggcacgaaagtggtgcccggtgccgggaaaaagactttggtatggtcgtcaaagccgcgagagctaaagccctccagcgcctcgccgcctagcacaatgcgctgaaatcctgcgctgactcgctcagtgcgcagcacgttcagctcacgaaaacgcaggtcattgcggacacgttgagggtaacgggtagatgccatgttgatgcccttctcaggtgaatacgatatatcggaatgaatttttaatgataatgattgctattaactaagaaatcaagattttttagattacatctgaatatatcttagatatagtttagatatatcaaattgagggaaaaacatgcgacacgaacacgacggcggcggacgccggccacgattttttggtcatggcgatttgcggctggtgatcctggatatcctgacccgcaacgcgagccatggttacgagctgattaaagagatcgaaaacctgacgcagggacattacacgccaagccctggcgtgatctatccgacgctggattacttgcaggatcaggcgcttatcaccattaccgaagaagagaacggccgtaagcggattgcgattaacgccgccggagaacagtggctggatgacaaccgggaacagctggagcagatccagacgcgtatcaaggcgcgctccgtcggtttccagctgcgcaaaaacccgcagatgaagcgggcgctggataacttcaaagcggtactggatctgaaggttaatcagggagagctcagcgacgcgcagttgaaacagattatcggcgtgattgaccgcgcggcgctggagatctcccagctggattaagccagcacgccgtcgctcacgcggaacacgcggaccagctctttcaggtgcatggcctgttcgttaagggatgccgccgccgcaacggactcctccaccagcgcggagttctgctgggtggtggcgtctatcaggccaatcgcgctgttgatctgcgagatgccttccgtctgttcatggctggcctggcgaatctcacgcaggattacgtccatctcctccacgttgccgaccatgccgttgataagcccgctggctttctccacaaggttcatgccgtcctgcgtctggcttgtggagctttcaatcagctggcggatctcactcgcagatgttgcacttttctgcgcgagctggcgtacctcgcccgccaccaccgcaaagccgcgaccatgctcacccgcgcgcgccgcttcgaccgccgcgtttagcgccagaatattagtctggaaggcaatggcgtcgatcaggtcgataatgtcggacatcctgttcgatgtttcgttaatcaggcgcatcttgctggtgacctgcttcatcatctcgccgttgtttttgaccacggcagccgcatcggcagacaggttcgtcgcttctccggtgtgggacgcggtgttcttcaccgtagcggtgatctgctccatcgacgcggccgtttgttcaacggaactggcctgctcctccgtgcgggcagccagatcctggtttcccgcgacaatctgcgcggcggcgctggagatgttttccgatccggtttgcacctgctgcacaatctccagcaggcgcgttttcatctccatcagtgcggtgagtagcagtccggtttcatctttaccgtgcgagataatgctgccggtgagatcgccatcggcaatggcctccgcaaaattcaccgcgtcgttcagcggtcgggtaatggatcgcacaatgaaccagccagtcaggctggctgccgcgacgctgaaaagcgtaatcaggaccagcaggagacgattggtgcggaaatcgccttccacctgctcgcccgcactctgcatttcatggtcctggatcgcaatcagcgcctgcactttcgctttataggactgttgcagattcagggtgttggtcatcatttcgtttatcgcgcccgcacggtcgttattctgcacggcctgcaaaatgcggtagcgcgagtcaagatattgctggcgtacgccgtggatatcggccagcacctgttgggattttttatccttgagagcgttgtccagctcgctcaggattgcggagatgcgctcgctgatcgccttcagacgctgctctgattgcgccgtgtacgtcccctgttcgtccagcagcatgagctgctgcgtgcttataaattcctggaagttgtcgattaactggttcgcttttaccgtcgttggatagtcgctggtaaggatggtttgcattccattgtttgcccgattcaggctcatcagagacaagcttgcgctgacgaccatcaggacaataaataatccaaacgccagaaataatttcgtgccgatctttacgtcatgtatgaacatatttaccccatcgatgtgattatttctcagacgatcgctgttatcgacaggaaacacgctaactttatgactttgatcgttttttttatttttcactctcaatgaatctggattgtaacaattaaaaaccgggcgctttttttagttacttaatatttcattaacaacataacttattctgaaaaacaaaaaagccgtttatcccggaggaataaacggctttatcgaagcatacatttcttaatgcagcacggtaaccgcatcttcaaggcgtccggcccggtgcttaaccatcgcggaaatctgcgcgctctcttcgaccaggtcagcatttttctgcgtaatgctgtccagctctgccacagcacgggtcagctctgtcaggcctgtcgcctgctctgaggtggcgtgactgatctgcgcgatgagctgcgtgacgtttttcacctgctcgacaatatcatccatagtacgtcccgcggcgtggacctgctcggcgcccgactgcactttgctggcgctggcgtcgatcagcttgcgaatatcgttagccgcgttcgcgctgcggctggcaagatgacgcacttcgcccgccaccaccgcaaagcctttcccctgctcgcccgcgcgtgccgcctcaaccgcagcgttcagcgccagaatattggtctggaaggcgatgtcattgataagcgaggtaatagagccaatgcgctgggtactgtcggcaatgtcatccatggttttcaccacggtctgcatcacggtgcccccctgcgtggccgcgctgctggcggccatcgatagcttgtcgacttcggctgcggtctcagagttactctgcaccgacgccgccatctggttcattgttgccacggtctgctgcacgttagccacggtctggcgcgtgcggtcgttgagatcttcattgccctgcgccagcctgtcgctgccgtcgcgcacgctcaccacctggctggagacgtcgttgatcagccagcggcacatcagccccagctgtccgacggcccgcagcgttagccccagttcatcgctgcggttaagatgctgcacgctgttacgctctccggtagcgaccctgagcgcctgccgtgcgacgttttccaccgggcggacaatctgttgctcaaacaccagggtgccaagcagcatcaccacggctgccgccaccagcgaagcccagcccgcggcactggcaacaagcgttgcggccatcaccgcgaaaagtaccgccattacgctacgcacgcgccagcgcagcggcatcgccggtagtttgccgagccagcctttgcgcaccaccagccctttatgaatgcgttttttgcagcgtccttcgttgagcgccttataaagcggctccaccgcggcgacctcgtcctgcgtggcgcgggtacgaatggacatatagcccgtcatctggccgttacgcaccattggtaccgcattggcacgtacccaatagtgatcgccatttttacgtcggtttttgacaatcccgctccagggttcgcccttttgcagcgtgtaccacatgtcggcaaaagccgctttcggcatatccggatgacgcacaatgttgtgcggttgcccgagcagctcctggagcgtaaagccgctcacttgcacaaaggtgtcgttagtgtgggtcatgtagctgtggaggtcggtggtcgacataagcgtggtgtcatcgtccagcggatattcattctgggtgacatagtcaggagaggacatagtgagcatcccttgcaggttatttgaatgttaattttgtggcttatgttttttcggcgataaaaaatttatctttagttgttaaatatgattgagatcgcaaatctcggttaaaccgcacttttcgtacgtttttctaattaattgatttaaaatactttcggcatgaaactacctacaaagcatgataccccggtgcacacttaaggcgcattccctgccctggagcagtgcaattgacgacaccccatccccggctcgttatcccttatcccgtgcggcgcgcgatggcatgattaaatattgtgcaactttgatttcacctggcgtttatcccgatttttgttaaggcatctgaggtggcgtaatccctgcaatacttaactcagtatcatgtgatacgcgatccccgggagcatattttgaacaggttaccttccagcgcctcggctcttgcctgtaccgcgcacgcactgaatctcattgagaagcgaacgcttgatcatgaggagatgaaacaacttaaccgtgaggtcattgattactttaaggagcatgtgaatccaggttttctggagtatcgcaaatctgttaccgccggcggggattacggagccgtagagtggcaagcgggcagtctgaatacgcttgtcgacacccagggacaggagtttatcgattgcctgggtggttttggtattttcaacgtggggcaccgtaatccagttgtggtttccgccgtacagaatcaacttgcgaaacaacctctccatagccaggaactgctcgatccgcttcgcgccatgctcgcgaaaacgctggcagccttaacgcccggtaagctgaaatacagcttcttcagcaacagcggcaccgaatcggtcgaagcggcgattaaactcgccaaagcgtaccagtcgccgcgcgggaaatttacctttatcgccaccagcggcgcgttccacgggaaatccctgggcgctctgtcggcgaccgctaaatctaccttccgcaagccgtttatgccgctgctgccgggcttcgccacgtgccgtttggcgacatcaacgccatgcgcatcgtgctgagtgaatgccgtaaaaccggcgacgacgtggcggcggtgatcctggagccgattcagggtgaaggcggcgtgatcctcccgccgcagggctatctgcccgccgtgcgtcagctgtgcgatgagtttggcgcgctgctgatcttcgacgaagtgcagaccgggatggggcgcaccggcaagatgttcgcctgcgagcacgagaacgttcagccggacattctgtgcctggcgaaagcgctcggtggcggcgtgatgccgattggcgcaacggtcgccactgaggaggtcttctcggtgctgttcgataannnnnnnnnnnnnnnnnnnnnnnnnnnnnnnnnnnnnnnnnnnnnnnnnnnnnnnnnnnnnnnnnnnnnnnnnnnnnnnnnnnnnnnnnnnnnnnnnnnnnnnnnnnnnnnnnnnnnnnnnnnnnnnnnnnnnnnnnnnnnnnnnnnnnnnnnnnnnnnnnnnnnnnnnnnnnnnnnnnnnnnnnnnnnnnnnnnnnnnnnnnnnnnnnnnnnnnnnnnnnnnnnnnnnnnnnnnnnnnnnnnnnnnnnnnnnnnnnnnnnnnnnnnnnnnnnnnnnnnnnnnnnnnnnnnnnnnnnnnnnnnnnnnnnnnnnnnnnnnnnnnnnnnnnnnnnnnnnnnnnnnnnnnnnnnnnnnnnngctggcctgtgcggcggcgctggccaccatcaacgtgctgctggagcaaaacctgcccgcgcaagcggagcagaaaggcgacatgctgctggacggcttccgtcagttgggccgggaatatccggatctggtacaggatgcgcgcgggaaagggatgctgatggcgattgagttcgttgataacgaaaccggttatagcttcgcaagcgagatgttccgccagcgggtactggtggcgggaacgcttaacaactcgaaaaccatccgcattgagccaccgttgacgcttaccattgagcagtgtgagcaagtgctgaaggcggcgcgtaaagcgctggcggcattacgtattgccgtaacatccgcctgaacatttatttttcctgcccttttagcagtatcagggcgatatgcaaagaaatccctgggatacgccagggatttctttatgcagtcagactgaggaataatgtgcataagtgcaaacacggttcatcatataaatttaaaatatttctttatgtaatatcagattgtaaaagcagccggataataacaccaccgcattcccaacgcatgtccgaataatgacagccgtaacgtcttgcattattaacaaaaccacgatgacattcatcgcagacattaataaaaccgaccagcgaatagaaatgcggttctgacggcgtgcaatatcattcaaacaaataaattatgagttaattttatatttagtaaaactaataaaacatcaacccattatcacattgatataatattatttaatccgtagaatcccctcattcatcagcgcagtggcggatgatataaaaccagtaacaacgtcctgggtaaaaataatatattaatctaaaaacatatcctataccactgcctcgaaaaaagattcacatgacattgtgaatatattatttcaattgacagcatgatgtttatctaaaaaggatttgtatgaaaaagcaagttatagcaatggctgttgccggcgcgctggctggtggcatggcaattaatgcgcaggccgataccgttaccgtttccggcgggaccgtcaactttgtcggccaggtggtaaacgccgcctgttccgtcgcggctgactccgtagaccagacagttaccctgagccaggtgcgtaccgtcaagctgacaacggtcggcatgcaggccaaccagaaagaagattttaaaatcgttctggaagattgcgacgccaccgttagccagaatgccgccgtgatctttaacggccagcaggaccctgctgtagaaggcagcctggcgaacaccgctggcgcaggctcggccaaaaacgttgcgctgcaactgttcgggccggacggccaggcgctgaacattggcgatacctcctccaacgttaagctgatcaacggcgaaaacatcatcccgctgagcgtggattacgtggccacaggcgcggccgagccgggcaacgtctcctccgtcgcaacgttccagatggtttattcctgattcgttagccgatctcgcttcttcgcctgcgggcggagaagcgttgtccggcaagcgttagagagttcgcaatgcagcaatccataaatcgggcgctgctgatagccggcactgcgctttttgccgtattgccagccgcggcaaaggacgatggaagcgtgacctttcagggtcaggtcgtcaatgcggcctgttccgtcagcatggattcccaggatcaaatcgtgcatatgggacaggtacgcaatagccagttcatcgccgccggtgactgggccaaaccggtacccttcttcatcacgctggaagcatgcgacaccagcgtaagccagcgcgccggggtgctgtttagcggcgagtctgacagcaacgatccccaggtttttcgcgcgggctatgggcctggcgccgccaccgggattggtatcggtctattcgatgcgatggggaacctggtaaagccagacaccgcgcccccctggtacagacctttgcaggacggtgaaaaccggctgagctatatcgccaggtatcgcgccaccgaagatagcgtcaacgctggtaccgcgaacgcgcaggtctggttcatcgttttttaccaataactgactcacaggcaagaagcctgacacatgagaaactgagggaacaatgcgtatcattacatcacgctgtaaactgacttgtctgatagctggcgcgctaacggctctgttcgcgatgggggtggccggttctgccagcgcaggcggtatcgcgctcgggggaacccgggtgatttatccccagggtgataagcaggcttcattagccattattaactcttcaacgaataccacttttttaattcagagctgggtgtccaatgccgaaggggcaaaatcagcggattttgtcattacgccgccgctgtttgttatccatcctaaaaaagagaataccctgcgtattatgtacgtgggccccgatctgcctgtcgatcgtgaaagcgttttttatctgaacagcaaagccattccttccgtcgagaaaaataagctttccggtaatacgctacaaattgccacccagagcgttattaaactttttatccggccgaaaaaattgccgtcgctctctattgatgcgcccaaaacattaacctgctcagtcaccaatggaaaagtcactattaccaatccatcgccttattacgtttcgttggttcagtttttcgtcggcagcacgcaactggcaaataacatggtagcgcccaaaaataacctggtggtggagatccccggtggcggcactggcagcgtgaggtttcagaccgttaatgactttggtgccaacacgcccgttcagtcatgcgcgaaataagtcgtatacggcgttacgtatgacgttttgtcattaaaagcctcgcaggtaagggaagacatgaagcgtgttcagccacgaagattttacgcgctcgtcagagcgtcgctaacgccgctggcgttgacgattgcgggactcctttcgtccatcaccgtgcgcgcggagtatttttttaacccggcatttttgtcgagcgatccttccgccgtggcggatctctcccgtttttcaacaaatggccaggcgccgggcgtctatcgcgtggatctctggctgaatggaacatttgtcaccacccgcgatatcaactttatcgccagaaccgtaacggacggagccgtacagggcgacgacacggggctaatggcctgcctgacgcccaaagcgtatgaaaacctgggcgtcaacgttcaggcattcccggcgctggccgccgcgaaagccgacagctgcgtggacattgccgccattattccggccgctgccactctctttaatttcgaacagcagcgtctggaaatcagcattccgcaggccgcattacgcaacaacgcgcgcggctatatcccgccagagcagtgggatgaaggtattaacgctctgctgctgaactataactttagcggctcatacagccgcgatcgcagcgaaaacggcacaacccacaaaagctatttcctcggcctgaacagcggggtgaatcttggtgcgtggcgtctgcgggactactcgacgtggaactactataacagcgacgagaaccgccatagcgaatgggaacatatcaacacctatcttgagcggacggtgattccgctaaagggcagactgacggtgggcgatagctatacctcgtcggaaattttcgacagccttccctttcgcggcgcgcagatcgcctcggacgacaacatgctgccagacagcatgaaaggctttgcgcccaccattcgcgggattgccaaaagcaacgcgcaggtcaccatcaagcagaacggctatagtctttaccagagctacgttccgcccggcgccttcgccattaacgatctcttcccaacctcctccagcggcgacctcacggtggaagtgaaggagacggacggcagtatctcccgctattccgttccttactccgccgtaccgctcctccagcgcgaagggcgggtgaagtatgccctgacggcggcacagtaccgcagcaataacggtcagcaggacgaggtgaattttgcccagggcacgctgatttgggggctaccgcagggcgtaaccgtctatggcggctcacagctttccggcgattatcacgcgctggctcttggcgctggcctcaatatgggcaactttggcgccgtctctctcgacgttacccacgcgcgcagtacgctggccgacgacaccagccatacggggcagtctcttcgtttcctgtatgccaaatccctcaacaagatgggtacgaacttccagctgctgggctaccgctactccacgtccgggttctataacctggatgagacaacctacacacatatgcagggctatacgggcgatgcggagcaggatgacgcgaatgaggccacgaactggctggactactacaacctcaactggactaaacgcggcaagcttcaattcaatatttcgcagcagctaggcaggctcggctcgctgttcgtgaccggaagccagcagagctactggcacacggacgacaaaaacacgctcgtccaggtgggatacagcggtacctgggccgggatctcatacagcctgacctacaactacaacaaatcgccgggcatgtcggatagcgataagatttatgcgattaacctttccttcccgcttagccagtggctttcacctgccaatgacgtcagccagaagcggaactacgcctatgccacctacggcatgagcgccaataaacatggagaaacatctcagaacgcggggattaacggcacgctgctggcggagaacaaccttaactacagcgtgcaggaaggttatgcccgccagggggctggctcgcaaggttccgccagtctggaatacgatgccgcctacggcaacgccagcctgggctacaactacagcgataacggcgattatcgggaagtgacctacggcctgagcggaggcgtggtagcccaccgcaacggcatcaccttaagccagccactgggtgataccaacgtgctgattgccgtaccgggcgcagcggacgtcagcgtcgagaatgaacccggtatccataccgacggacgcggctatgcggtggtgccttacgcctcggcctaccatctgaacaggatggcgctggacattaactccctctcagacgccatggatatcgatgatgccgtcaccagcgtggtgccgacccacggcgccatcgtgcgcgccacgtttaacgcccgtctgggcgcacgcgcgctggtaacgctgcgctaccacggcaagccggtgccgtttggcgccatggtttcccgcgacgataacggcagcgacaccatcgtaggcgaagaaggcgaaacctacctctccggcctgagccaaaagggagtgttgaaggcgcaatggggagaaggggcggataagcgctgtacggccaactaccacttacctgaaagcaaacagccgctgctgcggatcatcatggagtgttcataaatgaaattaaggatgattcttctctctgccgctgggctacttttttcgctgagcagcctggccgcaacgtgcaaaaacgctaacggcggaatttccatggtgaattacgatctgaccaccacgctcaccacggatcaaaacatcaagggcaacggtacagagctgaaccgaacccaggatatccacgtcaacgccacctgtcccccaggcaactgggagaagcgcacctatcgtacctatatctcacctttccccgtggtcaaaacggaaggcgagtggaaatatttacagcttgatccggattatattatcggtgcgatgaaaatccatgatgccaccatcggcgatttttatccgccggtggagtatgtccacatgggggggcacgaagaggtggatacgggcggcgtcttcccggtgaacgacagcaatctgaccttcaaaatacagattgtcaggccgttcatcggctcggtcgtgatcccgccgaaactgatgtttaacgtctatgtcaccacgacggaaaatgaccggcccaccgtaatcgtttatcagatcacctacagcggcgtaataaccgtcccgcaaaactgcgtgattaacgccgggcaaaccgtcaccgtcgattttggggcactctaccacggcgatttcacccaggccggacagcgacccgacagcgtagcgccaaaaacctttaccgtgccgatcgaatgcaacgctgatgtcaactcaccggcgcagctcaccctgcgggtacaggggacggcagacgctcgtttcgccaacgcgctggcgacggataacccggacgtggccgtcatcgtgaccagcccgcagggcgagatcctgcggccaaacgtgttctcaagcagcgtcccctttaccacggatacgtcaggacgcgcggacgtgacgctgcaagcctaccccatcagcaccaccgggcagtcgccagagctgggcgtcttcagggcgctggcgctgttacgcattgatttcgcctgaggaagcgtaatgaccatttcatggaaaaacaccgtatggctgagcgtggccctgttaaacccgccgctggtgaaggctgacgacacaagctttaacgtgcagtttatcggcaccatcgttggggaatcctgtaacgtcgatactaacagcgcagagcaaacgatcgacctgggtgaatttacgacagaggaatttccgcgcgtgggcgccacgacaccggaaaagcagtttgccatcacgctcaaaaactgcacccgcgcaatcggcggcacgaccgtctggtttaccggcgacgcggacgccaacgatcccacgctgcttgccttatcagatacgggaaaagggacgcagcacatgatggcgaccggactggcagtcgagctgctcgacagcgcgcgggcgtctgtcccgatcaataataccgagtcgccgctatatcccctgctgccgggcgataacacgctgaccttcttcctgcgctataaatctacgctgccgacggtcaccaccggcaacgccaccgccgtgatgtatttcgatctgctttaccagtaaggagacagaatgacgatcctgaacaggttatttatctgttgcgcgctgctgttgtcaggcaagacgttcgcccatgacggcacggtctatattaccggcgtggtgaaaggcaaaacctgtattgtctcccccggctcggaacagctggtagtggagatgcatgatgtggcggcccgccagctggccgggcaaaaaaacgaaacgccctatgagccgttcactattaaccttgaagcctgcggcgccgggttatccgccgtcagcacccattttgaaggcacgccggacggtaacaatagcgatctgctggccctgaccggcgggccggactatgcaaccggcgtggctatcggcctctataatcctgataaatcgctgatcgccatgggggatgaaagcctgccgttcgcgctaagcaatgaccagaccaccctggcgctgcatttttacgcccgctacctcgccgtgacgaacgccgttacgccgggggtggctaacgctgccgccacctttgtgctgacctatgcgtgaggccagcctgctgaaaaaagcggggatagccctgctgaccgccgcgtctttctggctcttgcctgctcaggccggggtggtgattggcggcacgcggtttgtttatcctcaggatcagcgcgctatcagcgtcaccgtgcgcaataagtcctcgctgccgtatctgattggcacaaaaatttatcgcggcggccgatggccgggggcgcagcacccccccgaagcggccaccgcgtggtttaccgcgacgccgccactttttgcactccagcccggacgtgagaataagatccgtctgtttcgcgccgatgcgccgcttcctgccgatcgcgaaacgcttttcacgctaagcattgcctccattccggccagccagcgtcacagcgataacgttcagatggcggtacgttccagcatgaagcttatctatcgcccggaggggattcagggcgaaccggcgctggcctatcgtcagctacgctggcagctgaccgccgacgggctgacggttgaaaacccgtcgccttattacgttacgctgtatcagctttccgttaacggaacgcgggtggataacgccggcgttgtcgcccctctgagccagcgacgaacggactggtgtaaagggactgccaggtgccagctcacctggcagtcgctgagcgacgaggggcggatattgccctcgatcgcccgcacggtgaaataattgctcgcgggggtatcctggcagcggaccgatactagcggtgaaactccgctaccgtcatggtaaagcgcagcactttttctccctcattggcatagccgtgcgccgcttccgttttcgctaccgccgacgcgccagcattaacctgtaccaccgtctcgtccaccgtcagggttaatacgccttcgttcacgtgcagcagctcaaacgttcccgccggatgtcccggagaggtgaaagtctctcccggatgcatctcccactgccacagctcaatcatgtcggggcctgcggtgcctgccagcaatctggcataaccgccctgtgcgccctgccacagaaccgggatcgcctcttcctgaataatgtgtacctgcggctcgctggagacgttaacgatgtctgccaccgagacgccaagcgcggcggccagtttgcacagaatggcaatgctggggttggcagcccctttttcgatctccaccagcatgcctttgctgacgctggcgcggcgggaaagctcgtccagcgacagtctttttctctttccgccagctgcggatacggttcgccacggccaggcttacctgggcaacatcggcgcccgcatcggtcattatattgactttatcagtcattggtcactaccatggtataaaacagtcaatacaggattatttatgtctcttctaacaccgtcaatagattcgcgacttgtcgggatcgcgcccggctttcgggcactgagcattctggttgaagctgccccgattacccaaccggaggttgcgcccgctgcgctggcgcaggcctgccagcagatgctcaatgatgatgtgccctgggcagaaaatcatctcgccgcctgggatgaggtgtttaaagcctttggtgcaaaacccaaacgtacgccctgctcggcctcggccctgcgcaagcgcgtgatgagagacggttcgctgccgccgctcgacccggtggtggatgtctataatgccatcagtatccgctacgctattccggtagggggagaaaatctggcggcttactcgggagcgccgcgcctgacgctggccgacggcagcgagccgtttgatacctttaaagaaggtgagccggttgtagaaaatccggagccaggcgaagttatctggcgtgacgatctcggcgtcacctgccgccgctggaactggcgacagggggtacgcacgcgtctggacagccaggcgcaatccatgtggtttattctcgaaagcctgccgtcgatgccgctggcggcattacaggaagctggcgatgagctggtgagcaatctgcaaaagctgatgccgggcgcgacggcgcgtattcagttgctggagctggcgtgaacaacgccgggtggcgcttcgcttacccggcctacaaaatcaacaccccccgtannnnnnnnnnnnnnnnnnnnnnnnnnnnnnnnnnnnnnnnnnnnnnnnnnnnnnnnnnnnnnnnnnnnnnnnnnnnnnnnnnnnnnnnnnnnnnnnnnnnnnnnnnnnnnnnnnnnnnnnnnnnnnnnnnnnnnnnnnnnnnnnnnnnnnnnnnnnnnnnnnnnnnnnnnnnnnnnnnnnnnnnnnnnnnnnnnnnnnnnnnnnnnnnnnnnnnnnnnnnnnnnnnnnnnnnnnnnnnnnnnnnnnnnnnnnnnnnnnnnnnnnnnnnnnnnnnnnnnnnnnnnnnnnnnnnnnnnnnnnnnnnnnnnnnnnnnnnnnnnnnnnnnnnnnnnnnnnnnnnnnnnnnnnnnnnnnnnnnnnnnnnnnnnnnnnnnnnnnnnnnnnnnnnnnnnnnnnnnnnnnnnnnnnnnnnnnnnnnnnnnnnnnnnnnnnnnnnnnnnnnnnnnnnnnnnnnnnnnnnnnnnnnnnnnnnnnnnnnnnnnnnnnnnnnnnnnnnnnnnnnnnnnnnnnnnnnnnnnnnnnnnnnnnnnnnnnnnnnnnnnnnnnnnnnnnnnnnnnnnnnnnnnnnnnnnnnnnnnnnnnnnnnnnnnnnnnnnnnnnnnnnnnnnnnnnnnnnnnnnnnnnnnnnnnnnnnnnnnnnnnnnnnnnnnnnnnnnnnnnnnnnnnnnnnnnnnnnnnnnnnnnnnnnnnnnnnnnnnnnnnnnnnnnnnnnnnnnnnnnnnnnnnnnnnnnnnnnnnnnnnnnnnnnnnnnnnnnnnnnnnnnnnnnnnnnnnnnnnnnnnnnnnnnnnnnnnnnnnnnnnnnnnnnnnnnnnnnnnnnnnnnnnnnnnnnnnncttgatgatgttgttgatcgactgatgttcaaattcgctgccgatatacacctgcgccgccaccgcgcagacgttcaggcgcagggcgtcctccatcgccaccgccacgcactcgttggacagctcgcccagaatcgagttaccgccggaggcgcgcagcaccaccggtttgttcgtcgcggcaggtacctggctcctgaggatgccgcgggtacacatcagcacgtcggtctcaccaaacagcggcgcgatggagaggtcgatacgctcaagaccggtggtcggcccctgaaagtagccgtggtcaaaggccagcatcaccgtgcggttgctctgcggattgaagatgcgcgaaagcctcgactgcattccccagtccagcgagccgcagcccttcagggtgtacggcacattttgctgcggcgtgccgatgccaaaatccttgccgtctttgatgtcgtctaaatcagccatttgctcccccgtcagaaatcgtatttgttgatgttctctttggtgaacaccacccgctccggcagcagcacaatgccattgcccttcgcctcatactggtagccctgcacgctgttcggctcgaccttcagcgttccgatatctttcacgtcgacgctgtcgccagggttaagatcgccttttttcagtaaacgatcggcgacattgaccgcaattttgccctgttgcaccacgtcccacaggccgaaggctttcaccgtgccgcgctcaacatatggacgcatcacgttcggcgtgctgaagccgacaatcgccaccccttcccgcttcaggttttccgccgcctgtgccgcggctggcagggcgttggcgtccggggcgataatcgcatccagatccggatacgcttttaagatcccctcggcggtttgcagggatttggtggcgtcgttataaccaaactgggtggtgacgatctgccattggggatgatctttctcgatttttgccttcgcctctttcacccactggttctggtcggtaacggtcgggctggagtagaagaacgccactttcgcgttcggtttggtgacctgcttgcctgccatctccaccagcaggccgccgagctgttccggcgtgccctggttgatatagatgctgcggcattccggtttggtgtcggagtcccaggtcaggaccttcacgccacgctgcatcgcgcgcttcagcgccgggcagagaccgtccggcgacacggcagagacgatgatggcgttataaccctggttgacgaagttattgatgagctgcacctggccggagacgctcggctcggtcgggccgtcgtaggtgacgtccacgccaagatctttccccgcctctttcgcgccgttgccgccgctggtgaagaatcccacgcctaccagtttcgggataaaggcaatgcggtccgccgcctgcgccgaagcgaagctgagggccattgccaggacgaatagttttgttttcatcttacgctccggatagttttctgaagagagaacgcacccattcgcggtgcagactcagcgaacgtcccatcaccaccacaaccagcagcgcccctgacagcgcgctcgacacctggttggggatgccgaccatctgtaaaccctgttgcaggtaccccaccagcaacgccgccagcgccgtaccgacaaccgaacctgacccgccgtagatattggccccgccgagtacggcggcggtgagcgcgggcatgagtaaatcgcgccccagatccgagcgcgcggaaccgaaataggaaaccatcaccagggcggcaaccgccgaggctacccccaccaggccgtacagcgcatacggcatgccgttcaccgacagcgccgcatagcgcgccgcgcgcgggttctgcccaatcaaaaacagatgccgaccaaagcgcccgcggtgggtaatcagccagaagaaagcggtaatcaccgcgaacagcaccagcgggatcggcaggcccaccaccgtgaggttagcgaacgccgtgaagccatccgggaagccgccgatcccctcgtagcccgtcgcccccgccatgccggagagcagcagcgccccgccgccgtagaggtagagcgtgccgagggtaatgaccaacgggctgatgccggtgtagtggatcagcgccgcattcaccagcccgcacagcaggccgagcagcagcgtcagagggatggcaaccgccatcagccaccctgcctgcatcatcacccccagcgcgatggcgcacaggccgatggttgagccgagggaaatatcgatcccgccgctgataatcacaagcgtaagcggcagcgccacgatgccaatgcagataaagtcgctggtgctgaacagcagcatgttgatatcaagcatgcgcgggttgatggcgccgaagagcaggatctccagcaccagtaaaatcagcagcgcgctttcccagttaagcctcatttacgccacctcttttttgcgtttcggaaacggggtaacgtgctttccccctttgttacccggctggaaacggctgtatttcagcgcccgctgatgccgtgagagcgcctgacgcagccgcccgtcgagcaccagcacacccagcagcaccagcccggcgataaagtcgttccaccacgccgggagcctgaacagcaccagcacggtatcgatttgggtgaggaagaacgcgccgagtaaggcgccgaccagcgtgccggtgccgcccagcagcgagatgccaccgagcacgcaggcggcgatggccttcatctccagcccgctgccggtctggttcggcacgaagccaatctgtgaggcaaacacaatcccggcgcaggccgccagcatgccgttgagggtaaaggcgatcatgcgggtgcggttcaccgccacgcccagctggcgcgcggcggcgaggttatcccccacggcgtaaaaatcacgtccaaaggcggtgcgcgacagcgtccacccgccggtggccgcgataatcaacaccagcatgccgagcggcgaaatgccgacggcggcgggctcagagagagatttcagccccggcggcagcccttctatccacttcccgccggtccacagcagcatcgccccacgatacagccccagcgtgccgagggtggcgacaatcgccggaatgcgcaggcccaccaccagaaaaccgttgaacgcccccgccagcgcgccgatcgacagcgcgaagagaatggaaacgggcaggctgtagccgccgttcagcgccacgccgacggcaatagcggaaagcccgacggtggagccgacggagacgtcaatattgcgggtcagcatcaccagcgccgcgccgatggccagcaggatcaggatctgcgcgctggcgaatatcatccccagcgtctgtaagctcaggtaggacgggttcagcgccaccagcacggcgaacagcgccagaatggcgagaaacgcgctcagctcgcggtttttcagtaagatcttcatgattgccctccaaacgccagcgccatcatccggtcgaggctgacggcctggcgcggcagctcgccgctgagtacgccctggtgcatcactagcacccgatccgcgaggccgggaaactcatcgagatcgcttgagatcatcagcaccgccacgttctgcgccgccacgcttttcagcagctgataaatatcggcgcgcgccgatacgtccacgccgcgcgtcggttcatcgacgatcagcagcagcggattggcctccagacagcgcgccagcagcaccttctgctgattaccaccggagagcgtgcgcacggtttgatccgcatggttgagcttgatccccagcgcccggtgatagcgttccactaccgcagactcccgctttcgctgctgccagagcgacggctcgttcagcgccacggtgttccagcggatcggcgcgtcgagaaacaggccggacacctgcctgtcttccggcagatagaccagccctttttgcaggcgtgaactgaccggatcggcggtgatctcctggctctccagccacacccgcccgccgcgaaccggacgcaggccgtagagcgtttcggcaaactcggtgcgcccggaccccaccagcccggccagaccgacaatctccccggcgtaaatctcaaggctgagatcgataaagccctccccggtgagcgcttccacgcgcagcacgggaaaatcctgcgcctgggtgcggcggttgcccggcagcgccagccacagcttttgcgtatcgctcagggatgtctcccggcttaccggcgtcatggcggcgatcagggcgttatcgtcaaaatgcgcagtttcgccgctgagcaccaccgcgccgtcgcgcatcactgagacgtgactcgccagctgtcgaatctccggcagcttatgcgagataaaaacaatcccgacgccaagatcctgcaaggcgcggatctggcgaaacagccgttcggtttcaccgggcgtcagcgaggccgtgggttcatcaaggatcagaattctggcgttgcgcatcagcccgcgcaggatctccaccatctgctggtccgccacctcgagggtgctggcggtagcgtcgaggttaagctggcattgcagctgccggagtttttccgccaggcgtttttcccgatcgcgctctcgcggcagacgaaacaggatgttttcccgcaccgtcaggttgggaaatagcagcggctcctgcggcaccagataaatgcctaacctgtgcgcctgcgccggggtaagccgtgcaaaagactcacccgccaccgaaagttcaccgctatccggggtttctaccccggcgatgatcttcatcagcgtcgattttcccgcgccgttaccgcccatcagcgcatgcacctgccccgcaagcagcgtgaaatcaatgccttttaagaccggtacgcctgaaaactgcttgctgatatcacgcgcgtcgagaagtggtgtcatcatcgctccgctattgaacaaatgatttttagatttaataatgttcaaaagcgtagacggtgaactatatttacaaccgtgcagggatcacagttttatcgattgagattcagataaagcggaaacgatcgaaaagatccgttttgtcgcgtggctcacattttcacgtcgcaccatcacgaacatatgatctaaatttttataagagttcaattatgagcgataaacgcactgcggaagaaggacggtttgccgggctggcactggcggaagaggagctggtggcgcgcgtggcctggtgctactaccacgacgggctgacccagaacgacatcggcgaacggctcgggctgccgcgcctgaagatctcccgcctgctggagaaaggccgtcagtccggggtgatccgcgtgcagatcaactcccgctacgagggctgcctggcgctggaaaccgagctgcaacaacgatttggcctgaagctggtgcgcgtgatgcccgccctgaatacgccgccgatgaacgtgcggctgggcattggcgcggcacagtcgctgatgggcgtactgcaacccggccagctgttagcggtgggcttcggtgaaaccaccatgagcagtctgcaacacttaagcggctttatcagctcgcagcagatccgcctggtgacgctctccggcggcgtcgggccgtacatgaccggtatcggccagctggatgcagcctgtagcgtcagcatgatccccgccccgcttcgcgtgtcatccgctgaagtcgccgggatcttaaagcgcgaaaccagcgtgcgggacgtgatcctcgccgccaccgcggctgacgtggcggtggtcgggattggctcggtaaaccagcgccgtgacgcgacgatactgcgctccggctatatcagcgaaggtgaacagctgatgtacgcccgtaaaggcgcggtgggcgatatccttggctatttccttaatgccgaaggggaatgcgttgaggagctggagatccacaaagaattactgggcgtcacgctcgatgaactggcgcagctgcccaccatcgtaggcgtggccggaggggaagagaaagccgatgcgatttatgccgcactgaaaggtcgccgtattaatggcctggtgacggaagagacgacagcccgcgcggtgctggctctggcaggataagagcagccctgcgcctgacacgaggcaagctcatgagttaccttttagcgttagatgcagggacaggcagcgttcgcgccgtgatttttgatttacagggcaaccagattgccgttggccaggccgagtggaagcacctgagcgtggagaacgtgccgggctcgatggagttcgacctcgacaccaactggcggctggcctgccggtgtattcatcaggcgctggagcgcgcacgcctgagcgcggcggatattcagtccgtcgcctgctgctcgatgcgcgaagggattgtgctgtacgaccgcaacggcgaggctatctgggcctgcgccaacgtcgacgcccgcgccagccgcgaggtggctgaactcaaagagatccacgactaccggtttgaatccgaagtgtatgatgtttccggccagacgcttgccctcagcgccatgccgcgcctgctgtggctggcgcaccatcgtccggatatttatcgtaaagccgccaccatcaccatgatcagcgactggctggcggcgaagctctccggtgagctggcggtcgatccgtccaatgcgggcaccaccggcatgctggatctcttctcccgcgactggcgtccggcgctgctcgacatggccgggctgcgcgccgatatcctctccccggtgaaagagaccggcaccgtgctgggcgctgtcaccaaagaggccgcgcagcagagcggcctgcgcgaaggcacaccggtggtgatgggcggcggcgacgtgcagctgggctgtctggggctgggcgtggtgcgcgccggacaaacggcggttctcggcggcaccttctggcagcaggtggtgaatctgccgcaggtgcgcaccgaccctgagatgaacatccgcgtaaacccgcacgtcatccccggcatggcgcaggcggagtcgatcagcttctttaccgggctaaccatgcgctggttccgcgacgccttctgcgccgaagagaagctgattgccgaacgaatgggaatggacacctactccctgctcgaagagatggcgagccgcgtcccggcgggctcccacggcgtgatgccgatcttctccgacgcgatgcattttaagcagtggtatcacgcagcgccgtcgtttattaacctctccatcgacccggaaaagtgcaacaaagcgacgctgttccgcgcgctggaagagaacgcggccatcgtctcggcctgcaacctggcgcagatttcccacttctccggcgtgacgtttgagagcctggtgtttgcgggaggcggggccaaaggcgccctgtggagccagattttaagcgacgttaccgggctgccggtgcgcgtgccggaagtgaaggaagcaacggcgctgggttgcgcgattgcggcaggtgctggcgcggggttgtttgcggatatggcttcgacgggcgagcggctggtgaagtggagccgcgagttcacgccgaacccgcagcaccgcgagctgtacgacggcatgatgcagaaatggcaggcggtgtatgccgaccagcttgggctggtggacagcgggctgacgacgtcgatgtggcaggcaccggggctggtgcgggcagcggcgccgtaaaatacgccggatggcgctgcgcttatccggcctacggtttgtagccccggtaagcgcagcgcaaccggggaagttctttgagatctatcacaatcattcgatcccgcttttacctttccgctgccgctggctaaattagtaactcatccgaccacataacaataattttacactggaagagactatgagccgctacccgtcgttattcgcccctctcgatctggggttcaccaccctcaaaaaccgcgtgctgatgggctcgatgcacaccgggctggaggagcgtccggacggggctgaacgtctggcagccttctatgccgagcgcgcgcgccacggggtggcgctgattgtcaccggcggcgtagcccctgccccttccggggtgacgatggagggcggcgcagtgttgaacgatgcgtcacagctgccgcatcaccgcattgtgaccgacgcggtccaccgcgagggcggcaaaatcgccctgcaaattctgcatactggacgctacagctatcagccgaacctggttgccccctcggctattcaggcgccgattaaccgctttactccccatgccctcagccacgacgagatcctggcgctgatagacgattttgcccgctgcgcggcgctggcgcgggaagcgggctacgacggcgttgaggtgatgggctcggaaggctatctgatcaacgaattcctcgccgcacgcaccaaccagcgcgacgacgaatggggtggcgactatgcccgccggatgcgttttgccgtggaggtggtgcgcgcggtgcgtgaacgtgcgggtgcggattttattatcatcttccgcctgtcgatgctcgacctggtggagggcggcggcacgttcgacgaaaccgtgcagctggcgcaggcgattgaagccgctggcgccaccatcatcaacaccgggattggctggcacgaagcgcgcatcccgaccatcgctacgccggtgccgcgcgcggcgttcagctgggtaacgcgcaagctgaaaggcatagtctccgttccactggtcaccaccaaccgcattaacgatccgcaggtggcggaggatgtgatctcacgcggcgatgccgatatggtatcgatggcgcgcccgttcctcgcggatgccgaactgctctccaaagcgcaaagcggccgtgcggacgagattaatacctgcatcggctgcaaccaggcgtgtctggatcagatcttcgtcggcaaggtcacctcctgcctcgttaacccccgcgcctgccatgaaaccaaaatgccgatcgttcctgcggtcaacaagaagcgtctggccgtggtgggtgcagggccggcgggcctggcgtttgcagtcaatgccgcctcgcgcgggcacagcgtgacgctgtttgatgcgctggcggaaatcggcgggcagtttactatcgccagacagatccccggcaaagaggagttctacgaaacgctgcgctattaccgccggatgatcgaggtgacgggcgtcgatctgcggcttaaacagtttgtcagcgcggcggatctgatcggtttcgacgaggtgatcctcgcgagtgggatcgccccgcgcacgccagcgatcgaaggcatcgatcatccgaaggtattgagctatctggatgtattaagggacaaagcgccggttggcgagaaggtggcgatcatcggctgcggcgggatcggttttgataccgcgatgtatttaagccagccgggcgaagccaccagccagaacatcgctgagttctgcgtggaatggggcattgataccagcctcagtcagtccggtggtttacgcccggaaggtccgcagctgccgaaaagcccgcgtcagatcgtgatgctccagcgtaaagccagcaagccgggtgaagggctggggaaaaccacgggctggatccaccgcgccaccctgctctcgcgcggggtgaagatgatcccgggggtgagctaccagaagatcgacgacgacgggctgcacgtgctgatcggcggcgaaccgcaactgctgcgcgtggatcatgtgattttgtgcgccgggcaggagccgaagcgggatctggcggatccgctgcgtgaggcggggaaaacggtgcatttgatcggcgggtgcgatgtagcgatggagctggatgcgcggcgggcaattgcgcaggggacgaagttagctctggcgatctagggcattgccgggcggcgcttcgcttgcccggcctacgggctcgaggccattgtaggcccggtaagcgaagcgccaccgggcatcaggccgcacatacccaatcttaccgacgacgccccagcttcaccgatttcagcaccacgaatttgttattggtggcaatggtgacgcagttgccgaaaatcttcttcagcttgtggaagtagtccaggtggcggttggccacgatatacagctcgccgttgattttcaggcagcggcgcgcgtggtggaacatctcccacgcgacgttatccgtcagggcgtgcttctggtggaacggcgggttacagaataccgcgttgaagcggaaaggctctacgcccgacagcgcgttattgatcataaactcgcagcgatccagtgcctccggcaggttggtttccacgttcagacggctggacgccaccgccattggcgattcgtcgctgaacaccacgctggcctccgggttcttcgccagcagcgtcaggccaatcacgccattaccgcagccgagatcaacgatttccccttccaggttttccggcagatgttccataaagaagcgtgcgccgatatccagaccggtacgggagaaaacgttcgcgtggttgtggatggtccagtcggtgccttccagcttccagctcagcgtctccggcgcgtcggccagcgccggtgcgctgaaggtacagttgatcaggcgcgcttttttccaggcaagcgtcgtggtggtcgggccgagcactttctcgaacaattccagcgtcgaggtgtgaatatcgcgcgctttggcacccgcgataatacgcgtatccggcgtcacgaccttacgcagcgcgcgaagctgctgctccagcagcgccatggttttgggcactttaatcagcaccacgcccggcgcctgcgggtagtccgcggtgctgtcgaggaacttcacgctggattcttcgatatcgttgtgacgcaggttttcacgcgtcgccagctcacttaagtaagaatcgccgatactgtaaggcgcatgttccgccagcgcgcaggccagcgcgccaaacgcgtcattcaggatcagaaccgggccgctgatttcagtcccatccaactgttgcagcagatattcatccgccgcttcccacgcctgaagcgggttaacgtcgtccgtttccgggaaacgtttaaggttgagtgaacggaaaccgttgtctaagtggctcatcggccctcctgaatggtaaaatttggcgtatccctgaaaagggtgcgtgagtatacccgttttcacactattttggggttttgatgaaccagctgacttatctccagggctatccggagcatttactttccaaggttcgtgacctgattgccgcgggaaagctcggcgcggtgctggaaaaacgctacccgggcacgcatgatttcgcgactgacaaagccctctggcagtatacgcaggatctgaaaaaccagtatcttaagagcgccccgccgatcaacaaggtgatgtacgacaataagatccacgtgctgaaaaacgcgctcggcctgcataccgccatctcccgcgtacagggcggcaagctgaaggccaaagcggagatccgcgtcgcgaccgtctttcgcaatgcgccggaagcctttctgcggatgatcgtggtgcacgagctggcgcacctgaaagagaaagagcacgacaaagcgttctactcactgtgctgccatatggagccgcagtaccaccagctggagtttgatacccgtttgtggctgacgcatttatcgttaaagagtaatgcgcagtagcgcacgcgaaatgtcatgatgacgtgctacagtggctttaggttccctgctacggagtacgtaaacgtttatgatacgtttcgcagtcatcggtacgaactggatcacgcgccagttcgtcgacgccgcccacgaaaccggcaaatataagctcaccgcagtctattcccgcagccttgagcaggcgcagagttttgcgaatgactacctggttgaacatctgttcacctcgctcgatgagatggcgcaaagcgacgccattgacgcggtctatatcgccagcccgaattctctgcacttcccgcaaacgaagctgttcctcagccacaaaaagcatgtgatctgcgagaagccgctcgcctcgaatattgaggaagtggaagccgccattgcgcttgcccgcgaaaaccaggtggtactgtttgaagcgttcaaaaccgccagcctgccgaacttcctgctgttgcagcaatcgctgccgaaaattggcaaagtgcgtaaagcctttatcaactactgccagtattcctcgcgctaccagcgctacctggacggcgaaaacccgaacacctttaacccggcattctcgaatggctcgattatggatatcggtttttactgcctggcctctgcggtcgccctgtggggtgaaccgcacggcgtaaccgccaccgccagcctgctggaaagcggcgtggatgcacacggcgttgtggtgctggattacggtgattttagcgtgacgttgcagcactcgaaggtcagtgactccgtactgccaagcgaaattcagggcgaagacggctcgctggtgatcgaaaaaatctccgaatgccagaagctaagcatcgttccccgcggcggcaaagcgcaggagctgacgcagcctcagcatattaacactatgctctatgaggcagaggtcttcgcccgtctggtagaagacaacgaagtgaaccacccggggctggcgatcagccgcaccacggcgaagctgcaaacggagatccgccgacagactggcgtgatcttccccgcagacggcgtgaatgtggaagccgtcgcgtaaaactgtgtaatgaaatcgtgcagaccattgacgaaaccgatggtctgacataatttgttacctgcaaaggggagtaacttcttcgccggtggatcgtcattacgatgcgtgcaaaaccgcatccggtcgccgggcaaccttcgtggttgtaagtgagaccttgccggaaggcgaggtctatgcataaaaagctaacggctatcgtcttctgaccatggccgtttttgttttttatgtgtaaggaaaatagtatgcattctgtcggcactccaatgctgtggggcggattcgcggttgtcgtgctcatcatgctggcaatcgacctctttttgcagggtcgtcgcggcgagcacggcatgagcgtcaagcaagccgccgtctggtcgctggtatgggttaccctctcactcctcttctgcgccgccttctggtggtatctggcctcaaccgaaggccgcgcggtggccgatcctcaggcactcgccttcctcaccggctatctgattgaaaaagcgctggcggttgataacgtcttcgtctggctgatgctgttcagctacttcgccgtgcctgcggctctgcaacgtcgcgtgctggtgtacggcgtgctgggcgctattgtcctgcgtaccatcatgatcttcgccggtagctggctgattacccagttcgaatggctgctgtatgtatttggcgcgttcctgctgttcaccggggtaaaaatggcgctggcgaaagaagacgataccgggatcggtgataagccgctggtgaagtggatccggggtcatctgcgcatgacggacaagatcgagagcgagcatttcttcgtgcgtaagaacggcctgctgttcgccaccccgctgctgctggtgctgattctggtcgaactgagcgacgtgattttcgcggtggacagtatcccggctatcttcgcggtcactaccgacccgttcatcgtgctgacctcaaacctgttcgccatcctcggcctgcgtgcgatgtacttcctgctggcgggtgcggcagagcgcttctcaatgctgaagtacggtctgtcggtgattctggtgtttatcggtatcaagatgctgatcgtcgatttctaccatattccgatcgccatttcgctcggcgtggtgtttggcattctgctggtgacgctgattatcaatacctgggttaaccgccagcacgataagaagcagcaggcttagtgcgttttgcccggtggcgctacgcttaccgggcctacaacgtcaccccgtaggccgggtaagcgcagcgccacccggcactttcgttaaccaatagttaaaaaacatgacgcaacacgtaaaatccagcattttacgcttccgcctttcgctgctttccctgatactcaaccaggcaaacaaatacttacatccggacacaaatgtgacttagagcacatccaggatggaacgcaatttcactcaggaataacgtatgagcacacaatcacgcggtctgttcgcgcgcctggcgcagggcagtcttgtaaaacaaattctggtcgggttggtactgggtattctgctggcgatggtgtcaaaacctgccgcggaagcgacggggctgctcggcacccttttcgttggcgcactgaaggccgtcgccccggtactggtgctgatgctggtgatggcgtcgattgccaaccaccagcacggacaaaaaaccaacattcgccctattctgttcctgtatctgctgggaaccttctctgctgccttaacggccgtggtgtttagcttcctgttcccgtccacgctgcacctgaccagcgcggccggtgatatcaccccgccgtccgggattgtggaagtgcttcgcggtctgctgatgagcatggtctctaaccccgtcaccgcgctgatgaacgcgaactacatcggcatcctggtctgggcgatcggtctgggcttcgcgctgcgtcatggtaacgagaccacgaaaaacctggtgaacgatatgtccaacactgtcacctttatggtgaagctggtgattcgctttgcgccagtcgggatctttggtctggtttcttcgacgctggccaccaccggtttcgatgcactgtggggctacgcgcagctgctggtcgtcctggtcggctgtatgctgctggtggcgctggtgatcaacccgctgctggtgttctggcagatccgccgcaacccgtatccgctggtgctgacctgcctgcgtgaaagcggcgtgtatgccttcttcacccgcagctcggcggcaaacattccggtcaacatggcgctggcggagaagctgaatctggatcgcgatacctattcggtgtcgattcctctgggtgcaaccgtgaacatggcaggtgcggcgatcaccatcaccgtgctgacgctggcggcggtgcatacgctgggcattccggtggatctgccaaccgcgctgctgctgagcgtcgttgcatcactgtgtgcctgtggcgcatccggcgtggcgggcggctcgctgctgctgatcccgctggcctgtaacatgttcggtattccgaacgagattgccatgcaggttgtcgcggtcggcttcattatcggcgtattgcaggattcctgcgaaaccgcgctgaattcctctaccgacgtgctgtttaccgcagcggcctgtcaggcggaagacgcgcgtttagcgaagaacgccctgcgcagttaaaaagaaaagcccggtggcggctacgccttaccgggcctacagggtttagtaggtcgggtaagcgctagcgccacccgacaaagcacttatagcgtcacaccactcttaaagatcgccagctcgcggaagtcgttcttctcgttgcaggtctgcctgccgctggcaaattccacaatcgtgtccacgaattcgctcagcagctgcggcatcgctttgccgtggatcagctggccggcatcaaagtcgatccagtgttttttcttcgccgccagctcgctgttagtggcgattttcaccgttggcacaaatccgccgtacggcgtgccgcgcccggtactgaacagcaccatgtgacagcccgctcccgccagcgcactggtggcgaccgcatcgttgcccggtgcgctcagcaggttcagaccgtgcgttttcagccgttcaccgtagcgcagcacgtccactacctggctggcgcccgctttctgggtgcagcccagggatttctcttccagcgtggtgatcccgcccgccttgttacccggcgacgggttctcataaatcggctggttatgggcgatgaagtactgtttgaaatcgttgaccatggtgacggtcttctcaaaggtctcttcgtcgcggcagtggctcatcagaatgcgctctgcgccgaacatctccggcacttcggtcagcactgtcgtgccaccgttggcaatcacgtaatctgagaagcggcccagcatcgggttagcggtaatgccggaaagcccgtcagatccgccgcactccaggccaaacttcagttcactcagcttgcccggctcgcgcttgtcgtgacgcatcacctcatacagctggtgcagctgttcaacgcccgcttccacttcgtcgtcctggtgctgacacaccataaagtgcacgcgctcaggatcgaactcgcccagcgtgtcgcggaaggcgtcgacctgattgttttcacagccgaggccaatcaccagcaccgcccccgcgttcgggtgacgcaccatattttgcagcatggtgcgggtattgatgtggtcgtcgcccagctgggaacaaccgtaggtatggctgaacagatgcacgccgtcggtgccttcggcattgttggtctctttcaggaaacgcgtctgaatttgacgcgcgatcccgttcacgcagccgacggtcgggaggatccacagttcattgcggatccccacctccccgctggcgcggcggtagatctgcacctcacgatcggccgcctgtccttcttctgcctggaagtcaggttgatagctgtactcgtccagatcgctgagattggtgcgggtattgtgggaatgaatgtattcacccggcgcaatatccgccagcgcatgaccgatgggcaaaccgtacttcaccacgttctcccctttcgcgatggggatcagggcaaacttatgtccacgtccaatggcctggcgtaacgtcaccgactggttgtcgaaggtcacttccgtcccttcggctaaatcggccagcgcgacggcaacgttatccagcgaatggattttgatgtattgcatatcaacctcaaacggccttagttcagttcaatggcgaagtagtcacgcgcattgttaaagcagatgtttctcaccatttcgcccagcagctggatatccgctggcgcttcgcccgcgtgcacccagcggccaatcatctggcacagaatgcggcggaaatattcatggcgggtataggagaggaaactgcggctgtcggtcagcatgccaacgaagcggctcagcaggccgagctgcgccagctgcgtcatctgacgctccatgccgtctttctgatcgttaaaccaccagccggaaccgaactgcatcttgcccggcatcccttcgccctggaagttgccgatcatagtgcccagcacttcgttatcgcgctggttcaggcagtacagaatggtttttggcagcaggttttgctcgttctgtttgctcagcagttttgacagctcttccgccatcggacggtcgttgatggagtcaaagcctacgtccgcgcccagcagtttgaactgacgctggttgttattacgcagcgcgccgatgtgatactgctgaacccagccgcggcgggcatattccgcaccgaggaacaccagcaccgcggttttaaactgcgccacttcgtgctcgctcagggcttcgccggagagacgacgcgccagaatactgtccagctcagcttcactggattccgcgaacagcactacgtccagcgcgtggtcagacactttacagccgtgtgcggcaaagtgatccagacgtttggtcagcgcggtttgcagatcgtcaaagcgacgaatgtcggtatccgaaacttccgccagcttcgccatgtagtcgttaaaggtcggcagctcgatgttgaaggctttatccgggcgccagcttggcagcactttgatgtcaaacgtgctgtccttcgcgacaaccgcgtgatgttccagagagtcgaccggatcgtcggtggtgcccaccatcttcacgttcatctgctgcatgatgccgcgcgccgagaagctatcctgcgccagcagttcgttgcactgatcccagatttcatccgccgtggcgggagagagcagcttgccggtgataccaaacggacgacgcagttcgaggtgcgtccagtggtataacgggttaccgatggtgtgaggaacggtagcggcccaggcgtcaaacttctcgcgatcggtcgcgtcgccggtacacaggcgctcggccacgccgttggtgcgcattgcgcgccacttatagtggtcacccttcagccagatatcatacaggtttttgaaacggtaattttcggcaacctgctgcggcggtaaatggcagtggtagtcgaaaatcggctggtcttttgcgtagtcgtggtacaggcggcgagcaaattcggtatctagcagaaaatcgtcggtcataaacggtgtcattatcgtcttcctcattacgggagcgtcagaaagcttatgttcagatgctgcaaagttatcacaccaatttccagagtccgacgtttttttcgtgagttagatcaataaacgtcgacaaataaattaccctcaaaggggtaaaccctctcgcagaccgcgccagttctggctttgcgcacgccgcataatgtccctacaaagattcacacttttgtgatgtcactcaccttttaaagttgtatgacaagttatcttttcgccgtcgcaaactataagccgacggaatgcattaccggtgtttgatacatcggatttaacggtacggaagccgacttagcacgattacttatggcaaggttcgggccgttccgggacaggttcccggttacgcccctcccgttacagaacagctcccggcaacggttgagttgttgccgtgtcccgacacggaaataacataacgatgaggttttacatgcgtaaaattaaagggttacgttggtacatgatcgcactggtgacgctcggcaccgtgctgggctacctgacacgtaacaccgtggcagcagcggcgccaacattgatggaagagttacatatctccacgcagcaatactcttacatcattgcggcttactctgccgcttacaccgtaatgcagcctgttgcaggttatgttcttgatattctgggtacaaaaattggttatgccttcttcgctgtagcctgggccgtcttctgtggggcgaccgcgctggccggcagttggggcggattggcgctggcgcgtggtgcggtaggtgctgccgaagcagcgatgatccccgcaggtctgaaagccagctctgaatggttcccggcaaaagagcgttcaatcgctgtcggttacttcaacgtgggctcctccatcggggcgatgattgctccgccactggtggtgtgggcgattgtgatgcacagctggcagatggcgttcatcatctccggtgtgctgagctttgcctgggccatggcgtggctgatcttctataaacacccgcgcgatcagaaaaagctgtctgacgaagaacgtgactacattatcaatggacaggaatctcagcatcagaccgacaacggcaaaaagatgtccgtctggcagatcctgggcacccgtcagttctggggtatcgccctgccacgcttcctggcagaaccggcctgggggacatttaacgcctggatcccgctgttcatgtttaaagtttacggctttaacctgaaagagatcgcgatgttcgcctggatgccaatgctgtttgcagacctgggctgtatcgtcggcggctacctgccaccgctgttccagcgctggtttggcgtgaacctgattgtgtcccgtaagatggtggtcaccatgggcgccctgctgatgatcggcccgggcatgatcggcctgttcaccagcccttacgtggctatcgccctgctgtgtatcgggggctttgctcaccagtctctttccggtgcgcttattacgctctcgtccgacgtgtttggtcgtaacgaagtcgctaccgccaacggcctgaccgggatggccgcctggaccgcaagtaccctgtttgcgctggtggtcggcgcgctggcagatacgattggtttcagcccgctgttcgcggtactggctatcttcgacctgatgggtgcggtggttatctggacggtgctgaagagcaaatccgccgatgaactggcgaaagagtcccttgggggaccggcgacgcagagttagcgttgttgtgccgggtggcggctacgccttacccggcctacaaaacccataggcccgcgcaagcgaagcgccacccggctaaatcttctcaaaagccgcctccgggcggcttttttcatggcgtaatatggagagtggcacgcaaaagtggtataacaaatcattcgccgtaccctgcctggagcgcatatggaaatcaccgaatcacgtcgtttatatcaacaacttgccgccgagctgaaagatcgcattgagcaaggggtctatcttgtcggtgataaacttcccgctgagcgtttcattgcggatgaaaaaagcgtcagccgtacggtggtccgcgaagccatcatcatgctggaagtggaaggatatgttgaggtacgcaaaggttccggcattcatgtgatttccagccaggcgaaacactcccccaccccggacgaaagtctggagtttgccagctacggtccgtttgagcttctccaggctcgccagctgattgaaagcaacattgcggaatttgctgcgacgcaggtgaccaaacaggacatcatgaagctgatggaaatccaggatcacgcgcgtaaagaaaaatgtttccgcgattccgaatgggacctgcaattccacgtccaggtcgcccttgcgactcagaacacggcgctggcggcaatcgttgaaaaaatgtggactcaacgcgttcacaacccgtactggaagaaattgcacgatcacattgattcccgcacggtagacaactggtgtgacgaccacgaccagattcttaaggctctgattcgtaaagatccgcatgcggcgaaactggcaatgtggcagcacctggagaacaccaaacagatgctgtttaatgaaacaagtgatgactttgaatttaacgctgaccgctatctttttgccgataatccggtcgttcacctcgataccgcgaccaatctcgcaaaataactccccgaactgctggcaggcgcaccgccgcgccttccggccagacagggtaagaaaacctctatagtgtcagcctttgtaaaatttctcgctcccctccgtggcttacgccaaaatcgtgtttcccctcaaattctgtgacgcagaacgtcgggctttgttacaattggattcacttcgttattttgtaagttagtgcttgctaaccagccaattaacagggaacagtgttggccacacatcaatgtgtccgcgagcgaccataatgaaatcataacaatgtcgccgtgctgttttcccgaatgacaggcgtgacgttaaccgatttccaggaacactgaatggaacttttgacccaactactgaacgccctctgggctcaggatttcgaaacgctggccaacccgtccatgattggcatgctctactttgtgttatttatgatcctgttccttgagaacggtctgctgcctgctgcctttttacccggcgacagcctgctggtgctggtcggggtgctctgtgcaaaaggggcgatggctttcccgcaaacggtcctgcttttgaccattgccgccagcctgggctgctgggtgagttacattcaggggcgatggctgggtaacacgcgaatcgttcagaactggctttcgcaccttccggcccattaccaccagcgagcgcaccaccttttccataagcatgggctttccgccttactgatcggccgctttatcgcattcgtacgcaccctgctgcccaccattgcgggcttgtccggcctgagcagtacgcgcttccagttctttaactggatgagcggcttgctgtgggtgctgatcctgaccacgctcggctacgcgctgggtaaaacgccggtctttatgaaatatgaagatcagctgatgtcttgcctgatgctgctgcccgtcgttctgctggtgtttggcctggtcgggtctctggtcgtactgtggaagaagaaatacggagccaggggttaacgatggttatctccccgctcgcgctgcgccgcttctcttacgctatcgtcgcgctgatgatgttcagcgctcttatcctgctgtggtctgcgcttcagcatcaggagtcgacgctggctatccgtcctgtgagccagggaaccagcgtgccggatggtttttccatctggcatcatctggacgcaaacgggatccgctttaagagcatcacgccgcaagacgatgtgctgctgataaaatttgactccagtgcgcaaagcgccgcggcgaaagccgtgctggaccgcacgctgccgcagggttacatcattgcgcaacaggatgatgacagccacgtagcctcctggatgtcacggttacgcgacacgtcgcatcgatttggttaacgactaagattccgaatattttcacctactttggtgaaactcccgtttacttactatgcttaagtacgcggagcacccctcagatgttctccgcatagttctggaacacggcttacgccgtaacacaatggaaggtttctataatgaaataccgcatcactctggctctggcccttttttctttaagcacagcttccttcgctatgtctctttgtcaggagaaagaacaggatatccaacgcgaaatcagttatgccgaaaagcataacaatcagcaccggatcgacgggctgaaaaaagcgttgagcgaagtgaaagacaactgtacggacagcaagctgcgtgccgatcatcaggaaaaaatcgctgaacagaaggacgagatagccgagcgccgtcaagacctacaggaagcgaaagagaaaggtgatgcggaaaaaattgccaagcgcgagaggaagttgcaagaggcgcaggacgaactgaaagcgctggaagctcgcgattattgagttaacggaaatctcaacaggagagaatcatgtcaaaagatacaacttcagaaaatctgcgcgctgaactgaaatccctggcggacaccctggaagaggtgctgaactcttctgcggataaatcgaaagaagaagtaagtaaactgcgcagcaaagcggagcaggcactgaaagagagccgttaccgtctgggcgaaaccggtgacgcgctggcgaaacaaacccgcgaagcggcagcgcgcgcagacgaatatgtacgtgataatccatggacgggtgtaggtattggcgccgcagtgggtgtggtgctgggtgtcctgctgacgcgtcgttgattatggaagatccacgtcacgcacaagggcctgctaaaaacgtcctcggcatcggccagcgtattcttacgacgctggtcgggattgccgaaacgcgcgtccggcttgcggtagtggagctggaagaggagaaagccaacctcttccagatgctgctcatgcttgggcttacgatgctctttgccgcgtttggtctgatgagcctgatggtgttaatcatctgggctatcgatccacagtatcgtctgaacgcgatgattgcgactaccgtggttctgctggtggcggcgctaataggcggtatctggaccctgcataaagcgcgcacgtcgaccttcctgcgccatacgcgccaggagctggccaacgaccgcgccctgctggaggatgataagtcgtgagcgacaaagccgaacgtcaaaagcggaaagcgtatctgttgagccaaatccagcagcagcggctggatttgtctgccagccgtcgagactgggttgaagccacgcatcggtttgaccgcggctggaacacggtcctgagcctgcgctcatgggcgctggtcggcagcagcgtgatggcgatctggtcggttcggcatcctaacatgctgatccgctgggcacgccgcggctttggcgcctggagcgcctggcgtctggtgaaaaccacgctgcgacaacagcagttgcgctagccttcttgccgggtgacggctacgccttacccggcctacgattgcgtgtaggccgggtaaggcgtagccgccacccggcaaaaccccctcccttactcaatatctttgaagaagattaacagttttccttgctaacatttgccatccgccccgtttaaactcctctccatcgacagcaaagacgcggtatctacccgaatttgcaagcaaataacgtttagccgctgatgtggtttcctggagagtaaaatgaaaaaattagaagatgttggtgtactggtagcgcgtattctgatgcctgttctgttcatcaccgcaggctggggcaaaattaccggctatgcgggtactcagcagtatatggaagcgatgggcgtgccggggttcctgctgccactgaccattctgcttgagttcggcggcggcctggcagtgctgttcggtttcctgacccgcaccacggcgctgttcaccgcaggctttaccctgctgaccgcgttcatcttccacagcaactttgcggaaggcgtgaactccctgatgttcatgaaaaacatgaccatcgcgggcggcttcctgctgctggctatcacgggtccgggcgcctacagcatcgaccgtcttctgaataagaagtggtaagcaggctatactgattacattcaaagcgaggagacatctcctcgcttttgctatctgacggaggagtaaaaaatgggacaactcgtagacggcgtctggcaggatgtctggtatgacaccaaatccaccggtggacgctttaagcgctctgtttcggccttccgtaactggctgaccgccgacggcgcacccggcccgagtggcgaagggggctttgcggcggaaaaagatcgttatcatctgtatgtttctctcgcctgcccgtgggcgcaccgcacgctgattgtgcgcaaacttaaaggtctcgaatcgttaattccggtttcggtggtcaacccgctgatgctggaaaacggctggacgttcgacagtggcttcccggccgcgacgggtgatgagctttatcatcacgatttcctgtatcagctctatctgcgcgccgatccgcactacaccggacgcgtaacggtgcctgtgctgtgggacaagaaaaaccagacgatcgtcagcaatgaatccgctgaaatcattcgcatggtcaataccgcgtttgacgcgcacggtgcccgcgccggggattactacccggttgagctgcgcgagaaaattgacgagctgaacggctggatctacgacaacgttaacaacggcgtctacaaagcgggctttgccaccagtcaggaagcgtacgacgaagcggtcggcaacgtgtttggatccctggagcgcctggagcagatcctcggccagcatcgttatttaacgggcgatcgcctcaccgaagcagacatccgcctgtggacgacgctgatccgctttgatccggtgtatgtcactcacttcaagtgcgacaagcatcgcatcagtgattacctgaacctgcacggtttcctgcgcgacatctatcagatgccggggattgcggagacggtcaactttgaccatattcgcacccactatttccgcagtcataagaccatcaacccaacgggcattatctccattggcccgtggcaggacctggatgaaccgcacgggcgcgacgtgcgtttcggataattatttagggaatcaattgattcccttttttaattcacagcatacatctatccttacctcgatcgcttagaaaacaagtgattgactgattaagaggcaaggaaaaatggactggtatttaaaggtactgcgcaactacgttggatttggtggccgcgcccgccgcaaagagtactggatgttcgttctggtgaacttcgtcctgattatggtgctgggcattgtggacaagatcctcggctgggaacgcgaggggggtgaaggcattctcaccaccatttatggtgtgttagttctgctgccttcatgggccgtactgtttcgtcgtcttcacgacaccgatcgttcggcgtggtggctgctgttgctgttgatcccgcttatcggctggatcgtgattttgattttcaactgtcagagcggaacgccgggcgaaaaccgctttggtccggatcctaaggcaagcgcgtaaattctgcccggtggcgcttacgcttaccgggcctacgcttatttgttgtggtgggcaaagagcttgggaatttcacgcaaacaccatgatttggcttcgcccatgctgtcacgacgccacgccataatgatatccacttcgctggtgtattccgggctgacgacgcgcagccgcccttctgcaatgtccttttcgacaaacgggtacggcatcgtcgccacgcccagccccgccaggagcgcctgccgtttgtcttccagcgacgttaccgtcagtcgcggctgtttatccagcaactgtaccgttaacaccgggcgctctcgggcggtatccgcgaccgccacgccgcggtatttcacgcgcgtgacctcagagagcggctccggctcctgatggatcgggtgatccggggcggcgacgtagacgttcatcacgctgtacagtttgcgcgaattgatttctgacgatgagcggaaatgcatgtccggcgcaatgacgatatccgccctgcccgtctcaagacgctcccacgccccggccagcacctcggtgatgatcgacagctgggtattggctttcgcggccagtctgtccaccagcgggaacagcgcctcggtgggcaccagcgcttcggtcactaacgtcagatgggtttcccagccgcgcgccagcgcttcggcatcggtcgtcagcttatccgccgcttccagcagcacacgaccgcgctccagcagcattcggccaacgttagtgaattttgttcgatgaccggaacgatcgaagagcaccacgtccagctcctcttccagcttttgcatggtgtagctcagggcagacggaacgcgccccagttcatctgccgccgcggcaaaactgccgcgcctgtcaatcgcgtccatgacgcgaagcgcctcaagcgtcaatgctctctctttagccatctcgttctcattcaggaaatttgaacataccaggcagaatatctggctaacaatgcagcgtccatacctttaccattgatttagtgtaaagagaggtcaagtttatgattacgacaagaacagcgaaacagtgcggacaagccgatttcggttggttgcaggcccgctacaccttttcctttggacactactttgaccctaaactcctcggttacgcttcactgcgcgtattgaatcaggaagtgctcgccccgggcgcgtccttccagccgcgcacgtaccctaaagtcgatatcctgaacctgatcctggaaggcgaggcagaataccgcgatagcgagggcaatcatgtccaggcgaaggctggcgaggcgctgttaatttccacgcagccaggtattagctacagcgagcataacctcagcaaagataaaacgctgacccgcatgcagctgtggctggatgcctgtccggagcgggaaaatccgctggtgcaaaaaatcgatctgaagggcggtaaacagcagctgattgcctcgccagacggcagcaaaggcagcttgcagttgcgccagcaggtgtggttgcaccatatcgaactgaaaaaaggtgaacaggcgagcttccagcttcatggcccgcgtgcctatttgcagtccattcacggaacggtgcatgcggtcacgcatacggaagagaaagaagcgctcacctgcggtgacggggcgtttattcgtgacgaagcgaatatcaccctggttgccgatacgccgctgcgcgcgctgctgattgatttgccggtttaagatcaacacgccccctcgctcgatcggttccctctccctatgggagannnnnnnnnnnnnnnnnnnnnnnnnnnnnnnnnnnnnnnnnnnnnnnnnnnnnnnnnnnnnnnnnnnnnnnnnnnnnnnnnnnnnnnnnnnnnnnnnnnnnnnnnnnnnnnnnnnnnnnnnnnnnnnnnnnnnnnnnnnnnnnnnnnnnnnnnnnnnnnnnnnnnnnnnnnnnnnnnnnnnnnnnnnnnnnnnnnnnnnnnnnnnnnnnnnnnnnnnnnnnnnnnnnnnnnnnnnnnnnnnnnnnnnnnnnnnnnnnnnnnnnnnnnnnnnnnnnnnnnnnnnnnnnnnnnnnnnnnnnnnnnnnnnnnnnnnnnnnnnnnnnnnnnnnnnnnnnnnnnnnnnnnnnnnnnnnnnnnnnnnnnnnnnnnnnnnnnnnnnnnnnnnnnnnnnnnnnnnnnnnnnnnnnnnnnnnnnnnnnnnnnnnnnnnnnnnnnnnnnnnnnnnnnnnnnnnnnnnnnagggtgaggggtaacgggttggattaaatcacaacaccttactcgccataatctcaatgatctgccggtccgtcgcctgcattgagcggcacgccagggcgcacaggttagagatagactgttccacgtcgtgcgccacaatcccctcgttacccgtcacggcagtatcatccagcgccatcatcacggctttccaggcgctggtgacgctggtcgagaccttcattgcgcagctgttagaggccccatcgcagatcatcccgctcacgtcgccgatcatactgccgatcgccatggcaatggtctggtaagatccgcccatcagccacgccatccccgccgctgcccccattccggccgttgtcgctgcgcacaacgcggacaagcgcggaagctggtaatggatatagatagccgacagatgcgagagcatcagcgcccgcgccagccgttcgtcatcggcctgaacgtgctcagccaccaccactaccggcatggtggcggtgatgccctgattcccggaacccgagttgctcatcgccggcagcgtcgcgcctcccatgcgggcatccgaggctgcgctggtgcggataataatgtctgaacccagatcctgcgccatccagccgcgtgcgcgctgtttattgagcgtcgcgccaatatgcagcccccagttgccacgcaaaccttcgcgggagagcgcatcgttcagccgccccgcatcgaggataaagcggatcgcgtcaaacggcacctgctctacaaactcaaggatctgcgacagcgtggtggtcgagagtaccgccagcggatcgtcgttgttctggctctgacgatcgtcaagcctgaagcgcgtttcgccctgacaaactacctccaccacgcgagtgtgcccgccagcgatggtcaccatcgccgaggattcaccgacgtaaacgcaggcgcgtgaatagaggatctcctcgcacggctcctgcaatttcacctgcaccagacctgcgttcagcagtgctttggcgcgcgttagcgcctcggccgacgcgtctttcaacacctccagcccggcgtgtgcattaccgcctgtcgcccccagcgcggccgcgatgggtaaaccgaccataccggtgccgggcaccgttacgccaagcccgtttttcatcaggttcggcgatacccacgcctcgatacgcgtcacctcaccgtcaagctgtccggcagccatcgcgcacgccagcgccagcgagacgggttcggtacagcccagcgcaggctttacctcttcctgcacggcgcgaataaaatggttccataaaggattaatttgctcagacatcgttacgaccttatttaacctcatgagaaggcgaggaaaggagaaacacaaagcagcagcccggtaatcacaataatcaccagcgatacgcctttatatttatgaagtgcgggcactttgtagaccagccacgccggaattaagcaacccaccatcccgaaaatagggctacagatggaggtaaagctcagcaccggcgcgtttaacacaatcgcgctccaggcaagcaggatagcgaacagcataatcccgcgctggacggtgctttcattgattttctccgccggcattttgcggcgcaggatgttcatcacgatgccctgcgtcgcctcacgaaagccgagatagacgccaaagaacgcggtcatcacggcaaaaatgttgaggatcacgctgacgattttgacccagcccgcaccgtcaccgctgatgaactgtgctgcgattgccagggcggaaatattctgctcgtaggcttttaccgcctcgtcgtgccccatcgccagcgtaaaggagaccgcgtagaaaaagaccgtcacaaacagcacgccaaaggcgatattcattgcccgcagcgccttatgacgcgccacctcaacggatttttcccgtgaacgataggaaatcaccatcgggcttaatgtctgaataaacagaatggaggttaaggtgaaaggcagcgtaataatggcgtttttaatcagcaggcccatcggcggcagcataccgacgttggctaaatgccagaggccaatcatcgaaagccccagcgccgctaccacaaataatttggtcagcaccatcaggctggagactttaaacagcagtttttcaccgcgcgacgaaatggcgaccagaatgcagatcaggaataagccgtagaacggattttccgacagcaaaccgtcggttacgccgaaggtgtgtaggtaggatgcgctgtcgttggtgatagccgtggaatagacaaacatccagatcaccagcatcacgaaataaagcgcacccaataagatgccccagtttttacctaaataaccgctaatgacgctcgggtaatctttgcattccggtgattccgccagcgtattaataaacaggcgctggaacaggtacatagccggataaccaattatcgacgagagtaaaaacacccacagccccattaacccgacctgcacaggaagaaaaacgatgcccgcgccgatagccatcccgatactcatgatgacccagcccgtatcggtgctgtcgaatttgatcgcctctcgccattcgctttcgctcattcccgcccgccttgccgcaggggaatcactcacaatcacactgctgtttgttgccatattcattgggcactcgcttattttgtagggtaactggttgtttttataaggttccgatcgccagcgattgcgagtcagagggtgcaggtgtgagttattgatatgggaagatcatatccggagcgcgggagaaaaaagtcacaacttttatagggattttctaaagcgagagaataatattacttcgggatagcagaaaggagagtaagttttctaaaattgacggcgttcacaaaattaaaagcctccccatttgaggaggctgaagatgaagcctgtattacatcgcctgcgtaaacgtcctcgaaatcacgtcctgctgctgctcgcgcgtcagggcgttaaaccgcaccgcataacctgaaacgcggatcgtcaggttcggatagttctccggatgggcgacggcatccagcagcatctcccggttcatcacgttgacgttcaggtgttgcccgccctcaatggtcgcttcgtggtggaagtatccgtccagcagcccgacaaggttggttttgcgcaccggctcgtccttgcccagtgcctgcggcacgatggagaaggtgtaggagatcccgtctttggcgtaggtgaacggcagcttggcgaccgaggttaacgacgccaccgccccttttctgtcgcgcccgtgcatcgggttggcgccaggcgcaaacggcgtgccgccgcgacgtccgtccggcgtgttgccggtcttctgcccgtaaaccacgttggaggtgatggtcaggatcgactgcgtcggtaccgcgttgcggtacgtcggcagcgcctggattttcttcataaagcgctcaaccagatcgcaggcgatactgtccacgcgatcgtcgttgttgccgtactgcggatagtcgccttcgatgacgaaatcgaccgccagaccggtgtggtcgcgcaccggttttaccgtggcgtatttgatggccgacagggaatccgccgccaccgacagcccggcaatgccgcaggccatggtgcggtagacgtcccggtcgtgcagcgccatcagcgaggcttcgtagctgtatttatcatgcatgtagtgaatgagattcagcgcgctgatgtactgtaccgccagccagtccatgaagtgatcgaggttcgccattacggtgtcgtaatccagtacctcatccagcagcggctcggttttcggccccacctggatcttcagcttctcatccaccccgccgttgattgcgtacagcagcgttttcgccaggttggcgcgtgcgccgaagaactgcatctgcttgccgatcaccatcgggctgacgcagcaggcaatggcgtagtcgtcgctgttgaagtcggcgcgcatcagatcgtcgttctcgtattgcagcgaggaggtgacgatcgacacctgcgcggcgtatttcttgaacgcgatcggcagttgttcggaccagaggatcgtcaggtttggctccggcgcaggccccatggtgtgcagggtatgcaggtagcggaagctgtttttggtcaccagcgtacggccatccagccccatgccgccaatcacttccgtggcccagatcggatcgccggagaagagcgtgtcgaactccggcgtgcgcaggaaacgtaccatgcggatcttcatgatgaagtggtcgatcagctcctgggcctgcacctcattcagccttcctgcctgcatgtcgcgttcaatgtagatatcgaggaacgaggccgtgcgccccagcgacatcgccccgccattctgggatttcactgcggcaaggtaggcaaagtagacccactgcaccgcttcctgcgcattcatcgccggacgtgaaatatcaaagccatagttcgccgccatctgctggatctggagcaacgcacgtttatgctccgccagctcctcgcgcaggcggatcgtggcctccagatcttctccgcgctccagtttcccctggagatcggcgaactgaagttcacgctcgcgcaccagatagctgatgccgtacagcgccacgcgacggtagtcgccgatgatgcgtccgcgcccgtagccgtccggcagaccggtcagcacccccgatttgcggcagcgcatcatctccggggagtaaacgtcaaacacgccctggttgtgggttttgcgcaggtctgtgaagagatattcaaactgcggatccatctcgcgaccgtaggcttcgaacgagctgcggatcatgttgatcccgccgtacggatgcagggcgcgcttgagcggcttgtcggtttgcaggccaacgatcgtctccagctcctgatcaatatagcccggcccgtgcgcggtaatagtagtggcgatgttggtgtcaaaatccaccggagcgtgagtagcattctcctgacgaatgccgaccatcaccttctgccacagcgccgtcgttgctggcgtcgcctgcgcgaggaaagcttcatcgccttcataaggggtgtagttatgctgaataaaatcgcgcacgttaatggcgtttttccattcttcaccgcgaaacccggcccatgcgtcgctgtaaggcgcgacgcccgtatcgattgttactttcatcagattctcgctttatcaggcgtaagccgcagccggagtaaccttcccaagacggagggcgtccagcgcgatcattttttcttcattggtagggatcaccgcgcaggccgcgcgggacgactcggtagagatcacgcgctcgcccgcgctgcccggcagggcatttttggactcgtcgaggatgatgccaaacaccttcaggtggtccaccaccagcgcgcggataagcacggagttctcaccgatcccgccggtaaacaccacgccatccagacggtgcagggacgcggcatgaccggcgatatgtcgcgcaatccggtggacaaaggtctttattgccagccgcgcccgctcgttgccgtcatgccaggctttctccagcgcgcgcaaatcggaggagatgccagagatccccagcagcccggactctttgttgaccacgcgctccagatcctcgaacgactggccggtctgccgggcaatccacgccatcgcgccaaaatccacgtcgccgcagcgcgtgcccatcaccagtccttcaagcggcgtcatccccatggacgtgtccacgcttacgccgttacgcaccgcgcagatggacgccccgttgccgagatgggcaatcaccaggccgctgtcatcgggagagagcccgagcagcgcgtgcgcctgcgccgacacgtagcggtgagaggtgccgtggaaaccgtagcggcgcacgcccagctcttcaaaatagcggtacggcaagccgtacagatacgcttgcggcgccatggtctggtggaagctggtatcaaataccgccacctgctgcacgccggggaacaggcgcccggcggcttccacgccgctcaggttggcgtagttatgcagcggcgccagcggggagacctggcggatctgcgccatcacctcttccgtgatcagggtcgactcgctgaagaggtcgccgccgtgggcaatgcgatggccaatcaaggccacgctgcccatcaggttgcgtttctccagctccagggcgatggcggccagcgccccttcgtagtcctggtgagccagtctgaccggctcacccccattcacggaaataaaggctttttctgtgttgatgccgtccgcaatgcccgtcatcagggcatcgcagcctgcggcgtccagcaccgagaacttaacagaggacgatccgcagttaatgaccagtactaccggaaactcaatcatggtatggctccgctcttcctgagctttggtttaaaacagtttgtacacgatgttcagaatggtcagcatgccgaccacggttacgaagatgttctcggtccggcctttgtatttcgccagcgcaggcgccttgcggatggcgtacatcggcagcaggcacagcaaagaggcgataattggcgcgcccatggcttcaataaggtccaggatgttcgggttggcgtaggccacaatccaggtggagcccatgatgaagaccatgctgatggtgttcagcttgcccacggagactttcttcttgtcgcccttgtaaccgaacttgaggatcagaccgttcagcccctccagcgtgcccagatagtggccgaagaaggatttaaagatagcgaccagcgcgatgatggaggcgccgtattccagcaccgtggcgaacgtggatttactgcctgacatcgacgcgaagtggttcgccaggtaagagagcaccggaatgttctgcgctttggcgtccgccatgttctgcggagagagcgtaaacaggcagctaaaggcgaagaacatcaccaccgccaccatcagcaggctggcgcgaccaatgattttggaacatttctgctcggtaaactctttcccgaactccggttcgtactcttcgcgcttggagactacaaacgaggagacgataggcgagaagttgaaggagaagaccatgatggagatccccagccataccgtgaccagaatgccgtcatgaccggtgaaggcgatatcgctcaggttaacctggtcgatcaccgccgagttccagtacgggatcagcgagagagaaatcaacaccaggctggcgatgaacgggaacaccaggtagctcatcactttcaccatcaggtctttaccgaaccagataacaaaagccatcagcagcagcaggaacagcgccaccacgccgcggttcagggcgggcatctggagctggttttcccagaaggtcataaaggtgttggtaatggtgacgccgtaaatccacagcagcgggcaaatggcaaagaagtagaggaaggtgatcaccaccccgccggtcttaccaaaatgctcctccaccgtttcggtgatgttgccggagacgttactgccggacaaacacagacgcgccagcgcgcggtggcagtaaaaggcaatcgggaacgcgagtaccagcatcagcaggatagggatcaggccgccaaagcctgcacggatagggaagaacagcacgcctgcgccaatggcggtaccaaacaggccgagcgtccaggtggtatccgatttacgccaggtggacgtttttgtctggccaacgataatgctttctgtgttgctcataagtcatcctttatgcgtcaacgaagccggtaatttgggaaacacgggagagatcaatattgccgccggaaataatgcagacggtttttcggccctgaatatagtggtccagcttgccgcttaataacgccgcgcacgccagcgcaccggcaccttccgtgaccaccttatttcgctgaataagcgcgatcatgctgttgcgaatctcgtcttcgctgaccagcacaatgtcatcgactaattcacgaacaatttcgaaggttaaattacctgggcgagacacgtcgcagccgtcagctaatgtgccggtaacacgatgactggttatttctccggcctgatacgatgccgccattccgtgcacattttcagactgcacgccgataatattgatagttgggttgatggatttaattgctgtcgcaataccggcaattaaaccgccgccgccgatggggacaatcacgttatccacgtcatataaatcttcgaggatttccaggccgatggtgccctgcccggcaatgactttcggatcgtcgtaaggcgggataaaaatgcgcccttccatctcgacgatttcgctcactttggcgatggtgtcgttaaagttttcgccgtgcagcaccacttcggcggagtagtcgcgcgtggcggcaaccttggatttcggcgcgcccatcggcatgaccactttgccgtcgatgccgagcatggcgcaggagagagagaccccctgcgcgtggttccctgcggaacaggccaccacgcccttgcgtttttccgcatcggtcagcgagcttaatttattaaacgccccacgtattttaaacgaaccggtacgctgcatattttcaaatttcaggaatatctcacccttacaccgttcgctcagataattcgagcgcggcataccggttttatagatctttcccgccagtctttttctggcgtcctgaatatcttcaatggtcaccgggagatcgtaagtaatgtgcataatatcctcgttataataattcattgttttcaggcaaagtcagggtatcagagcgttaaaaagcgtcgctccgggtgttttaaatcatcattatttctatcgtcgtttttcgatattcatcgacgaatattgttttgccagttcaactaatactgacgccgattttttaatactgtaattttttgaccacacggcggcataacgcgccacgggtaattcatcttccaccggcagaacaataaactggtccgagccgaatggcgcaatcatgtcacgggggatcaccgtcaggtaatcggcattgaggacaaggttatagatggtgacaacggaatcggtctggacgatgttatcaatgctgatgtggttgtcttgcagggtggtcaggagttcgttgtagtagcccatatcggtttgcggcatcacccactgctcgtgcgtgagcgatgccagtctggtcgggccggtgcacgttcgtgatttactcgccaccagcacaaactcggattcaaacagtggctcaacgtgaagatcctgaagctgcatcccgtcgctcagcgtgccgatggcgaaatccagccggccatcgcgaatggcgggcaggaatgaagagagctgcgcttcatacattgagacacgcgctttcgggaacacttccttgaattttttgatcatcccggacaggaaggtgaagccaatcagcgacggatagccaaaagagacgtccatgacggtactgaaactgaggctgttaatctcgctcaccatgtttttcatttcgcgggtgatcgactcagcgtaggacagcagcacctgaccggcggcagtgagttttacgccggtgttcttacgcaccatcacttccaccccaaagtaggattcgatgtcgctgatgattttgctgacggcaggttgcgtcagccccagttgtcttgcagcagaacctatggagccacttttgatgacttcctgaaataccacgaggtgctgtgttttcggtagaataatagtattcataatattctgcgcttatttccctatgacgcagcggattctacccaatattgtttcagggggtatgtgctgttactcacaatttgccaggacgctctgttttcaaccgcacccgaaatctatttatgtctttataaatcaaatacttattacaataaaaatacgcatttacgctgatattgatcaataaaaaacgcggtaataaatttattttatggcaataaccagcgtgaatttttttgccttaaaaatattaataaaggctatctttcaggcaattaaaggttaataaaacaccattgttcctttaaaacatttttgtggtttatcaactttaccaggaatatttattcaatttccggttaaagagtgggatatatcacacattcaccagaagaatgtttttagattcaatattaaattatcaaatgaataacattcggcatcactgactaaacatttacaacatctgctcaacactaaaattttctaattttatagcgttaaattttgtgattgcgatcatgcgcagcagatgagaggaacacaaagtcaaccaaatagtgaaatgtgcttagcgtcgcaaaattgagaattgatgtcgtttggcgcttcgcttacccggcctgcaaccttctgaaagcaaaaaccccgccgaagcggggtttcgtaagaagttgaagctgaccgataagccgggttctgtcgtggacagtcattcatctaggccagcaatcgctcactggctcaagcagcctacccgggttcagtacgggccgtaccatgtgaacccctatttggccttgctccgggtggagtttaccgtgccacggactgttaccagccgcgcggtgcgctcttaccgcaccctttcacccttacctgatcccgcttgcgcgggccatcggcggtttgctctctgttgcactggtcgtgggtttcccccccaggcgttacctggcaccctgccctgtggagcccggactttcctcccctccgcccgtctcccccgaaagggacgacgacgaagcggcgactgtctggtcagcttcggcgcgcagtatagagggtttgcccgccgctgtcacccctggctacgcatgcctacctgcaatgtggccgcgatattccgcgaggcgcggtaaatgttgtcatacgctccctggaacgcctcttccagtgaaccgatgcgggtcagtacgctgaacaccgcgtcgatgccgtactgatgcaccacacccacatcctgcgtcagacttccggcaatcccgatcaccggcttatggtattttttggcgacgctcgccacaccgacgggcactttgccattaatgctctggctgtcgatgcgcccttccccggtcagcacccacgtgcagtcgtgaatatgttcttcaagattgagcgcctgagtgacaatctcgatgccgcttttcagctcagcgcccaggaaggccatcagcgctgcgcccatgccgcccgcggcgccagcccccggaacccggttgacgtcaatgcgcagcgattttttgatcaccccggcgtagtggctaagattggcgtcgagttcgaggatcatctcctccgtggcgcctttttgcgggccaaagatacgcgacgcgccgctttcaccgaccagcggattcgtcacgtcacaggcgacgcggattgcgcatccctgaagacgcggatcgagatcggaaatatcaatccggttaagcgccatcaggctgccgccgccgtagccgatctccgtcccgttcgcatccgtaaacttcgcgcccagcgcctgcatcatacccgcgcccccatcgttggttgcgctcccgccgataccgataatgatgttgcgcgcgcctttatccagcgcgctgaggatcagctcccccgtcccgcgcgacgtcgtgaccagcgggttacgctgcgcgggaggaacaagcaccaggccgctggcggcggccatctcgataaacgcggtggtaccgtcgcccgagatcccccagctggccttcaccttttcccctaacgggccggtgacgacagcctgctgccaggtgccctgcgtcgcagcgatcatcgcttcaaccgtaccttctccgccgtcagcaacgggaacagacacgtaatgagcatcggggaaaatttcccgaaatcctttttctatcgcctgcgccacctcggtggcagacaggctttctttataagagtctggcgcgattacgattttcatagttgtatgcctgagccgtaggcccggtaagcgtaacgccaccgggcaggacgtcattagcgagcaatttcaaccttcgccagtttttcgtaatagcacgctaacgcgctgtgatcggcggtgcccagaccgtccgcacgcagcgcctgcatcatctccatgacggcggcagtcagcggcagctgcgcgcccacgccgtgggaggtatccagcgcattcgccagatccttaatgtgcagatcgatgcggaaacccggcctgaagttacgatccatcaccatcggcgccttggcatccagcacggtgctgcccgccagaccaccgcgaatggcctgatagaccagatccggattaacgcccgctttggtggccagcgtcagcgcttcggacatggccgcgatgttcaacgccacaatcacctggtttgccagcttggtgacgttgcctgcaccaatttcaccggtgtgcaccacggagccagccatggctttcatcaggtcgtagtatttgtcgaacacagctttatcgccccccaccatcaccgacagggtgccgtcgatggctttcggttcgccgccgctgaccggcgcatccagcatttccacgcctttcactttcagcgcctcgctgatttcgcggcttgccagcggtgcgatagaactcatgtcgatcaccaccagacccggcttcgcgccgtcgataatgccgttctcacccagcgccacctctttcacgtgcggggagtttggcagcatggtgataatcacgtcgcactgctcagcaatcgcttttgcggttgtcgccgtttctgcgccagccgcaatcacctctgccaccgcgtctgaattacgatctaaaaccaccagtgagtaacctgctttgatgaggtttttgctcattggtttgcccatgatacccaggccaataaaacccactttcagcgtcataatctgtttcctcaatgatggttattttttaaaagcgtccgctaatttctgcgtggcggcgcggaatacgccgagatcgctgcccacggcaacaaacgttgcgccccactccaggtagcggcgggcatcggcttccactggcgccagaatgccgcacggtttaccgtgcgctttggcacgggcaaaaatgtgctgaattgcgcgctgcacgtccggatggctggcgttgcccagatgaccaaaggcggccgccagatcgctcgggccgacgaaaatgccgtctaccccctccgtcgcggcaatagcgtcgacgttatcgaccccctgctggctctcgatctgaaccagaatggtgatgttcttgttggactgagcgaaatagtccggcacggtgccaaacatgttggcgcggtgcgagacggacacgccgcggatcccttccggtggatagcgggtcgccgccacggccagcaccgcttcttcttccgtttcaacaaacgggatcaggaagttgtagaagccgatatccagcagacgcttgatgatcaccggctcgttggtgggcacacgcaccaccggcgcgctgtggctgcctttcagcgccatcagctgcggaataaacgtgttgatatcgtttggcgcatgttcgccgtccagcaccagccagtcgaacccggccaggcccagcacttcggtgctgatggggttggccagcgcagaccagcagccaatctgaatctggtgcgccgcgagggccgctttaaatttattcgggaagatgtcgttactcattacttataccttttttaattccgcagttttagccagtagcttttcttatttattccgactcagcgtcagcgttatatttattttcctgactgaattttggcgttataaaatcgtcattcagtataatcgtcaccacccggcagcacattgtctcaatgctcaattatccaacgggagtggcacgctattttgagcatatgcccaacacagtgggcgctgatgcacagaatcaacgattagtggttcgggagcgatcgcgatcacattctcacctttcctctcctggcattctttatttcctcaataagaaacaattaaccatctggctatatttagtatcagatattttgctggagaagagtgaacaatggccgatattgaaattcgacaggcgtcgccgacggcgttctatataaaagtgcacgataccgataacgtggcgattattgtcaacgacaatggcttaaaagctggcacccgctttccggatggcctggagctgattgagcacattccgcaggggcataaagtcgcactggtcgatatcccggcgcagggcgaaatcgtgcgctacggcgaagtcatcggctatgcggtgcgcgctatcccgcagggtagctggattgaggagtcgctggttgagctgcccaccgccccgccgctggagtcgttgccgctggctacccgcgtccctgagccgttgcctccgctggagggttataccttcgagggttaccgcaacgcggatggcagcgtgggaaccaaaaacctgcttggcatcaccaccagcgtgcattgcgtggcgggcgtagtggattatgtggtgaaaattattgagcgcgatctgttgccgaaataccccaacgttgacggcgtggtgggtcttaaccacctgtacggctgcggcgtggcgatcaacgcgcccgcagcggtcgtgccgatccgcacgattcacaatatcgcccttaacccaaactttggcggtgaggtcatggtgattggtctcggctgtgaaaaattgcagccagaacgcctgttgcagggtactgaggatgtgaaagccattccggttgacgatgccagtgttgtgcgacttcaggatgaacaccatgtcggcttcagatcgatggtcgacgacattttacaggtggcagagcaccatctggagaagctgaacaaacgccagcgtgaaacctgcccggcctctgaactggtcgttgggacacagtgtggcggcagcgatgcgttttccggcgtcaccgccaacccggcagtcggttatgcctccgatctgttcgtgcgctgcggcgccacggtgatgttctccgaagtcaccgaagtacgtgatgctatccacctgctcacgccgcgcgccgtcaacgaagaggtgggcaaacgcctgctggaggagatggcctggtacgataactatctcgacatgggcaaaaccgaccgcagcgccaacccgtctccgggtaacaagaaaggcggcctggccaacgtggtggaaaaggccctcgggtcgattgccaaatccggccagagcgcgattgtggaagtgctctcccctggccagcgaccaaccaaacgcggtctgatctacgcggcaacgcctgccagtgatttcgtgtgcggtacccagcaggtggcgtccggcattacggtacaggtctttaccaccgggcgcggcacgccgtacggcctgatggcggtaccggtgatcaaaatggcgacccgcaccgagctggcaaaccgctggtatgacttaatggatatcaacgcgggcaccatcgccaccggggaagagagtattgaagaggtgggctggaagctgttccacttcattctggatgtggcaagcgggcggaagaaaaccttctccgatcaatggggattgcataactcgctggcggtgtttaacccggcgccggtgacgtgatggcccctcaccctgtcctctccccaccagggagagggtaaaaaaccgcaccgggcagtcccctctcccctatggagctgagggttccccacaaaataatgcctgcaaagacggccccctctcccttgagggagagggctgggtgagggggaacatacggttctggtggtcattccgttcactttatgttccttgctactctgtcacgacatgannnnnnnnnnnnnnnnnnnnnnnnnnnnnnnnnnnnnnnnnnnnnnnnnnnnnnnnnnnnnnnnnnnnnnnnnnnnnnnnnnnnnnnnnnnnnnnnnnnnnnnnnnnnnnnnnnnnnnnnnnnnnnnnnnnnnnnnnnnnnnnnnnnnnnnnnnnnnnnnnnnnnnnnnnnnnnnnnnnnnnnnnnnnnnnnnnnnnnnnnnnnnnnnnnnnnnnnnnnnnnnnnnnnnnnnnnnnnnnnnnnnnnnnnnnnnnnnnnnnnnnnnnnnnnnnnnnnnnnnnnnnnnnnnnnnnnnnnnnnnnnnnnnnnnnnnnnnnnnnnnnnnnnnnnnnnnnnnnnnnnnnnnnnnnnnnnnnnnnnnnnnnnnnnnnnnnnnnnnnnnnnnnnnnnnnnnnnnnnnnnnnnnnnnnnnnnnnnnnnnnnnnnnnnnnnnnnnnnnnnnnnnnnnnnnnnnnnnnnnnnnnnnnnnnnnnnnnnnnnnnnnnnnnnnnnnnnnnnnnnnnnnnnnnnnnnnnnnnnnnnnnnnnnnnnnnnnnnnnnnnnnnnnnnnnnnnnnnnnnnnnnnnnnnnnnnnnnnnnnnnnnnnnnnnnnnnnnnnnnnnnnnnnnnnnnnnnnnnnnnnnnnnnnnnnnnnnnnnnnnnnnnnnnnnnnnnnnnnnnnnnnnnnnnnnnnnnnnnnnnnnnnnnnnnnnnnnnnnnnnnnnnnnnnnnnnnnnnnnnnnnnnnnnnnnnnnnnnnnnnnnnnnnnnnnnnnnnnnnnnnnnnnnnnnnnnnnnnnnnnnnnnnnnnnnnnnnnnnnnnnnnnnnaccctctccctatggggagagggttagggagaggggaaaagcctctttagaccagcaccacatcgatcccgcttttgcgtaatccttcaaggctttccgccggaatgccttcatcaacgataatcatgtcgatccgctgggtatcaataattttatgcaggcttgaacgattaaacttgctggagtccgtgacaacgataatacgctccgccacctcgcacattttgcggttcagacgggcttcatcctcgttgtgcgtactcaccccccggtcgagatcgatggcatcgacgcccaggaaaagcaggtcaaaatggtaattctgtaaggactgctccgcctggtcgccgtagaaggactgcgactgacggcgcaagtgcccgccggtcatcagcagctccacgccctccgcttccagcagcgcgtttgccacgttcatcccgttggtcatggcaatgacatcggtgtgctggcgcagcatgcgggcaatttcaaaggttgtggtgccggagtccagaataatgcggtgacccggcttcaccagttcagccgccgcctgcgcgatgctgcgcttcactgccgtattaagggaacttttgtcctcaacggacggctccacgccgggggcattgccttcgcaaatcagcgcgccgccgtaagcgcgaacggcaatcccctgcttttccagaaaggccagatcgttacggatcgtcaccgtcgacacgccgtataaaagagaaagatcgttaacctgcacgcttccctgcgcccgcaaccgctgaatgatctgctctcgcctttcactggtgccggtgatgcgcttctctgcggatgaatcggtgctgctcatacgagctccttagtaaatacactttcgtttcatttcgttttgcttattaacgcctttcttttgagggaatgcaagccctgtatggtgggcagacgcaagctttaccgccgctgaaacctttcattatgtttcttttgtgaaacagatcggaaaactattatctttcgttttatttttacctcaccataatgcagtatcaaatgaaacaaaacgaaagataaataccaataccatccgaaatggagaggaaagtgaaacatctgacagaaatggtggaacaacataaacgggggaatacaaacgggatttatgccgtctgttccgcacatccactggtacttgaagctgcactacgttacgcccattcacaacagacgcccctgctgatagaagccacctcaaaccaggtggatcagtttggcggttataccggtatgacgcccgccgatttttatgggtttgtctgcaagctggcgggatctcttggtttccccacctcgcagctgatccttggcggcgatcatttaggtccaaaccgctggcaaaacctgccggcttcgcaggcgatggcgaacgccgacgatctgatcagaagctacgtggcggccggatttaaaaaaattcacctcgattgcagcatgtcctgcgaagacgacccggttccgttaaccgatgcaatcgttgccgggcgtgccgctcggctggctaaaattgccgaaaccacctgtctcgagcaatttggcgtagccgatctggtctacgttatcggcacggaagttccggttccaggtggggcacacgagacgctgaccgagcttgaggtcaccacgccagaggcggcacgcgccacgcttgaggcacaccgccacgcattcgagaaggaagggttaagcgacatctggccgcgcattattggcctggtggttcagcctggcgttgagttcgaccatacgcacgtttgtgactatcaaccgcataaagccgtcgcgctgagcgagatggttgaagcctacgacacacttgtatttgaagcacactctaccgattaccagacgccgcaggcgctgcgccagttggtgaaagatcacttcgccattctgaaagtcggccctgcgctaaccttcgcgctgcgcgaagcgctgttctcactggcagcaattgaagaagagctgctgccagcaaaagcctgctcagggctgcgtcacgtcctggaaaacgtgatgctcgatcgcccggaatactggcaaagccactatcacggcgacggcaatgcccgtcgcctggcgcgcggttacagctattccgaccgcgtgcgctattactggccagacagccagattgacgacgcctttgagcggctggtacgcaacctggcggatgaaccgatcccgctgccgctgatcagccagtatctgccgttgcagtacagcaaagttcgcgatggcgctctcaggtccacaccacgggaactcatcctcgaccacattcaggacatactccagcagtaccatgccgcctgcgaaggcgtaacgactcaacacgcataattaaaaagaggaaaacgctatgccaaacattgtcttatgccgcattgatgaacgcctgatccacggtcaggtgggcgtacagtgggtggggtttgcgggggcgaacctggtgctggtggcaaatgacgaggttgcagacgatccggttcagcaaaacctgatggagatggtgctggcggaaggcatcgccgtgcgtttctggtccctgcaaaaagtgatcgacaacattcatcgcgccgccgaccggcagaaaattctgctggtctgtaaaacaccggctgattttttaacgctggtcgagggcggcgtgcccatcacccgtattaacgtcggaaatatgcattacgccagtggcaaacagcaaattgccaaaacggtatctgtagacgcgaacgatatcgccgcgtttaacggcctgaaggcggccggagtggaatgcttcgttcagggcgttccaacagagactgctttggatctctttaaactgctctgagggattcacaatggaaatcagtctgttgcaggctttcgcgctggggcttctcgcctttatagcgggcctggatatgtttaacggcttaacacacatgcaccgtccggtggtactcgggccactggttggcctgattctgggcgatttgcacaccggaattctgaccggcggtacgttagaactggtctggatgggactcgcgccgctggcgggcgcgcagccgccaaacgtgattatcggcaccatcgttggcaccacatttgccattactacaggcgtgaagccggatgtcgccgttggggtcgccgtgccgtttgccgtggcggttcagatggggatcaccttcctcttctcggtgnnnnnnnnnnnnnnnnnnnnnnnnnnnnnnnnnnnnnnnnnnnnnnnnnnnnnnnnnnnnnnnnnnnnnnnnnnnnnnnnnnnnnnnnnnnnnnnnnnnnnnnnnnnnnnnnnnnnnnnnnnnnnnnnnnnnnnnnnnnnnnnnnnnnnnnnnnnnnnnnnnnnnnnnnnnnnnnnnnnnnnnnnnnnnnnnnnnnnnnnnnnnnnnnnnnnnnnnnnnnnnnnnnnnnnnnnnnnnnnnnnnnnnnnnnnnnnnnnnnnnnnnnnnnnnnnnnnnnnnnnnnnnnnnnnnnnnnnnnnnnnnnnnnnnnnnnnnnnnnnnnnnnnnnnnnnnnnnnnnnnnnnnnnnnnnnnnnnnnnnnnnnnnnnnnnnnnnnnnnnnnnnnnnnnnnnnnnnnnnnnnnnnnnnnnnnnnnnnnnnnnnnnnnnnnnnnnnnnnnnnnnnnnnnnnnnnnnnnnnnnnnnnnnnnnnnnnnnnnnnnnnnnnnnnnnnnnnnnnnnnnnnnnnnnnnnnnnnnnnnnnnnnnnnnnnnnnnnnnnnnnnnnnnnnnnnnnnnnnnnnnnnnnnnnnnnnnnnnnnnnnnnnnnnnnnnnnnnnnnnnnnnnnnnnnnnnnnnnnnnnnnnnnnnnnnnnnnnnnnnnnnnnnnnnnnnnnnnnnnnnnnnnnnnnnnnnnnnnnnnnnnnnnnnnnnnnnnnnnnnnnnnnnnnnnnnnnnnnnnnnnnnnnnnnnnnnnnnnnnnnnnnnnnnnnnnnnnnnnnnnnnnnnnnnnnnnnnnnnnnnnnnnnnnnnnnnnnnnnnnnnnnnnnnnnnnnnnnnnnnnnnnnnnnnnnnnnnnnnnnnnnnnnnnnnnnnnnnnnnnnnnnnnnnnnnnnnnnnnnnnnnnnnnnnnnnnnnnnnnnnnnnnnnnnnnnnnnnnnnnnnnnnnnnnnnnnnnnnnnnnnnnnnnnnnnnnnnnnnnnnnnnnnnnnnnnnnnnnnnnnnnnnnnnnnnnnnnnnnnnnnnnnnnnnnnnnnnnnnnnnnnnnnnnnnnnnnnnnnnnnnnnnnnnnnnnnnnnnnnnnnnnnnnnnnnnnnnnnnnnnnnnnnnnnnnnnnnnnnnnnnnnnnnnnnnnnnnnnnnnnnnnnnnnnnnnnnnnnnnnnnnnnnnnnnnnnnnnnnnnnnnnnnnnnnnnnnnnnnnnnnnnnnnnnnnnnnnnnnnnnnnnnnnnnnnnnnnnnnnnnnnnnnnnnnnnnnnnnnnnnnnnnnnnnnnnnnnnnnnnnnnnnnnnnnnnnnnnnnttgcccggcatacattgatattcacgtccacggcggcgcgggtgtggatgtgatggatgatgcgcccgacgtgctggaccggttagccatgcacaaagcgcgtgaaggcgtgggggcgtttctgcctaccaccgtcaccgctccgctggaggcgatccatggcgcgttacggcgcattgcccggcgctgtcatgccggtggccccggcgcgcagatcctgggcagctatctggaaggcccgtactttacaccgcagaacaaaggggcgcacccgccagaactgtttcgcgaactggatctcgcggaacttgatgagctgattgcggtttcgcagaacacgctgcgggtggtggcgcttgctccggaaaaagtggatgccctgaaggcgatccatcacctcaagcaaaaagggatacgcgtcatgctgggccacagcgccgctacatacgcgcaaaccctagccgcatttgatgcaggcgcagccgggctggtgcactgctacaacggcatgacggggttacaccaccgggagcccggcatggttggcgccgggcttacagacccacgcgcgtggctggagcttattgccgacgggcatcacgttcatcctggagccatgcggctatgttgttgctgcgcgaaggatcgtacggtgctgattaccgatgccatgcaggcggcggggatgcctgatgggcgctatacgttgtgtggtgaaaatgtcgagatgcagggcggcgttgtccgcacggcctcaggcgggctggcgggcagcacgctcgcgctggatgccgccgtgcgaaatatggtggagcatacggggatcgccccagaaaacgcaatccatatggcctcgctgcatcctgcccgtctgctcggtatggatcacctgctgggaacgttagcgccaggcaaacgcgccaatgttcttgcgctggatgcgggtttacacctccggcagatctggatccagggtcaggctctttccctgtagccccttcacagtgtgccctgttggccttacggaagacgatcgtaaggcctttcttttcctttccttgacttttacctttcctttcgcgatcacacttttcgttttatttctttttcgccattgaactttcgatttcttttctatagattttctttaactgctaaagtgaacaagtgaaacgaaacgaaagatagcgacacatttgccagcgtctgatgtggaattcacacgactaaggactgagttatgccacaaaccactatcgccaccaccggcacctggaccgaaaaagagatccgccagcagccagccagctggcttcgctcgctcaacaatattgataatctgcgcgcgtcgatcgacagttttctgacgccactgttgcgcaagcccgatctgcggatcgttctgaccggcgcgggtacgtctgcttttatcggcgacatcattgcgccatggcttgccagccacacggggaaaaacatcaccgcgatacctacgaccgatctggtcaccaacccgatggattatttcagcccttcgcacccgctgctgctggtctctttcgcccgttctggcaatagcccggagagcgtcgccgccgttgagctggcgaatcagtttgtaccggagtgctaccacctgtcgatcacctgtaatgaagcaggcagcctgtaccagaatgccgtcgacagcgataacgcctgcgctctgctcatgccagccgaaacgcacgatcgcgggttcgcgatgacaagcagcatcaccaccatgatggcgagctgcctggcggtattcgcaccggaaacgatcaacagcaaaacgttccgcgacgtgtccgatcgctgtcaggcgatcctcacatcgcttggcgatttcagtcccggcgtctttggtaacgaaccgtggaaacgcattgtttatctgggcagcggtggattacagggcgccgcacgggagtctgcgctgaaggtgctggagctgaccgccggcaagctggcggcattctacgattcgccaacgggtttccgtcacgggcctaagtcgctggtagacaacgaaacgctggtcgtcgtgtttgtctccagccatccgtatacgcgtcagtacgatcgggatctgctcgccgagctgcgacgcgatcgtcaggctatgcgcgtggtagccattgcagccgaaacggatccggtcattgaagctggcccgcatatcctgctgccgccttcccgttcatttaacgatatggagcaggcgttctgcttcctgatgtacgcccaggtcttcgcactgacccagtctctgcacgttggcaatacgccggatacgccatccgctagcggtacggttaaccgtgtggtccagggcgtcgttattcatccgtggcaggcttaagaggacaggctcatgagtattatttctaccaaatatcttttgcaggacgcacaggcgaagggctatgccgttccggcctttaacatccataacgccgagacgatccaggcgatcctcgaagtctgtagcgaaatgcgatcgccggtgatcctcgcgggtacgccggggacgtttaaacatattgcgctggaagagatctacgccttgtgcaacgcgtattcccttacttatgacatgccgctggcgctacacctcgatcaccacgaatcgctggacgacattcgccgcaaagtccatgccggcgtacgtagcgcaatgatcgacggtagccattaccccttcgaacaaaacgtcaagctggtgaaatcggtcgtcgatttctgccacctcaacgactgtagcgtcgaggccgaactgggccgactgggcggagtggaagatgacatgagcgtcgacgccgaaagcgcattcctgaccgacccgcaggaagcaaaacgctttgtcgaactgacaggcgtggacagcctcgccgttgccatcggtaccgcgcacggtctttataccaaacgcccaaaaatcgacttccagcggctggccgagatccgtgaggtagtgacagtgccgctggtgctgcacggtgcgagtgatgtgccggatgaggatgtgcgccgcaccattgagctgggcgtctgcaaagttaacgtcgcaacagagctgaaaatcgccttctctgacgcagtcaaagcctggtttgccgagaacccacagggcaacgatccgcgcttctacatgcgcgtcggcatggatgccatgaaagaggtggtcagaagcaaaatcaccgtttgcggctcggcgaaccggctgctgcttgcgactgaagcctgaacccatcgcgcataacgttagtacctaaaaaaataactataagcctcgcaaatatgaaggcgcgtccttaagccggacagcgccttccattatcctaaaaatccgaggagtccctacatgacacaggaaaagtcgtttaaatcgaaagcgtgggagtttttccagagcctgggaaagacgtttatgttcccggtctcactgttggcctttatggggttgttgttaggtatcggtagttctgtcaccagcccttccaccatcaaaagttttccctttctgggcggcgagttaacgcagctcacctttggttttatcgccatggtcggcggctttgcttttacctatctgccgctgatgtttgccatggcgatcccgatgggccttgccagacgtaataaagcggtgggcgcttttgccggattcgttggctacatgctgatgaacatgagcatcaactactacctgaccgccacccaccagcttgcggatgccgccaccatgagacaggtgggacaatccattgtgcttggcattcaaacgctggagatgggcgtgctcggcggcattgtggtaggggtgatcacctacttcctgcacgaacgtttccaggacacggtgctgcacgacgcgtttgccttctttagcggcattcgttttgtgcccatcattaccgccctcaccctgtcgctggtcggcttgtttatccccctgctgtgggaatatgtggcaatgggcattgccgggattggtcatatcatccagagcaccagcgtctttgggccattcctgtatggtgtgggcgtactgctgctcaaaccttttggcctacaccacatcctgctggcgatggtgcgcttcaccccggcgggcggcattgagatggttaacggccaggaagtggccggtgcgctgaacattttctacgccgagctgaaagctggcctgccgtttagtccgcacgttacggcatttttatcgcaagggtttatgccgacctttatcttcggcctgcctgccgtggcttacgctatctaccgcaccgcgcgcccggaaaaccgtccggtgattaaagggctgctgctttcaggcgtgctggtttcagttgtcacgggtatttcagagccgattgagttcctgttcctgtttattgcccctgtgctttacgcgtttcatatcgttatgtctggcctggcgctgctcggcgtcaccatcggcaacaccgacggcggcattctggatctgctgatcttcggcgtcatgcaggggatgtcgaccaaatggtatctgctgttcccggtgggtatcgcctggtttgctatctacttcttcgtcttccgctggtacatcctcaggcacgatattaaaacgccgggccgtgaggttgacgcgcagggtgcgctccaggcggtggaagccaatacccgggcacgtggaaaatcgaaatacgatcatgggcttattcttcgcgcgcttggcggtaaagagaatattgagtcgctcgacaactgcattacccgcttacgtctggtggtaaaagagatggggcttatcgaccagcaggcgctgaaggccgcgggcgccttgtcagtagtggtgcttgatgcccacagcgttcaggtgatcatcggtccgcaggtgcagagcgtcaaatccggcattgaagccttaatttaacagggggacgttgtgtttgatttcgacagaatcattgagcgtaaaagcgataaatgccgtaaatgggatcatacgtttgtgtgctcgcgtttcggtgatgtcccggagggatttatcccgctgtggatagcagacatggatttcacctcgccacccgccgtgattgaaggcttccagcgcatcgtggagcatggcaccttcggttacacctggtgcttcgacgaattctacgatgcggtcatcgccttccagcgtagccgtcatcaggttgaggtgcataagtcatggatcaccctgacctacggcaccgtttccacgctgcactatacggttcaggcgttctgcaaacccggcgactgcgtgatgatgaataccccggtgtatgacccgtttgcgatggcgacacagcgacagggcgtgcgggtgcttgcaaatccgctgagcgtgaaggaaaaccgctatcagctggattttaatctgattgaagttcagctcaaaactcaccgtccaaaactgtggttcttctgctcgccgcataacccctcgggccgaatctggcgcgcggatgagatacgtcaggtgtccgatctctgtaagcgctacggcacgattctggtggttgatgaggttcacgccgagcacattctggacggtacattcgtcagttgtctgacttcgggctgtgccgcccaggacaacctgattgtgctgacctcccccaataaagccttcaaccttggcgggctaaaaacatcctactcaatgattccagacgattcgctgcgccagcgtttccgccagcagttggagaagaactccattacctcgcccaatatcttcggcgtgtggggaattattctggcttatcagcaaggtctgccatggctcgacgcgctgaatggttatctgcgcggcaatgcccgctaccttgcggatgccatccagacccatttccctgcatggaagatgatgaacccggagtcgtcgtatctcgcctggatagacgtcagtgcggacgatcgcagtgcgacggcgctaactcaacatttcgcaaaacaggctggcgtggtcattgaagatggcagccactacgtacaaaacggcgaaaactacctgcgtattaacttcggcacccagcgctactggctggaacagtccatcaaccgaatgctgaagcattactgataaggatcttaccccgatgaaaaaaatgctcactctctcgctgctgactctctgtgtttctcatggtgcggcggcagcaaactacgcgctcagtaacgacaatattgccctttcgtttgatgatgcaaacgcaacggtagtggtaacggacagcaaagctaaccatccgctcacgccccaggagttgttctttctgacgctaccggatgaaacaaaaatccacaccgctgatttcaaaatcaagcacgtcgaaaagcaggacaatgcgatagtcatcgactttacgcatccggattttatcgtaacggtgaaactgaacctggtgaagggaaaatacgccagcattggctacaccatcgccgccgtcgggcagccgcgggacgtagcgaaaattaccttcttcccgacgaagaagcagtctcaggcaccttacgttgacggggcgattaacagctcgccaatcgtggccgactcgttcttcatcctgccagacaaaccgattgtgaatacttacgcttatgaagccaccacgaacctcaacgtggagctgaaaacgccaattctgcctgagacaccggttagttttaccacctggttcggcactttcccggaaactaatcagctgcgccgcagcgtaaaccagtttatcgatgccgtgcgtccgcggccttataagccttacctgcactacaacagctggatggacatcggcttctttaccccttactccgagcaggatgtcattgggcggatggacgaatggaataaagaatttattgccggacgcggggtggcgctggacgcgttcctgctggacgatggctgggacgatcgcaccggacgctggctgtttggcccggcattcagcaacggttttggcaaagtcagggaaaaagccgacagcctgcatagctcggttgggctgtggctttcaccgtggggcggttacaacaagccgcgcgatattcgcgtctcgcatgcaaaagagtatggtttcgaaaccgtagacggcaagctggcgctgtcggggccgaactattttaaaaactttaacgatcagatcatcaagctgatcaaaaacgagcatattacctcgttcaagctcgacggaatgggtaacgccaattcgcatatcaagggcagcccatttgcatcggattttgacgcgtccattgccctgctgcacaacatgcgcagcgcaaatccgaacctgtttatcaacctgaccaccggcaccgacgccagcccgtcctggctgttctatgctgattcaatctggcgtcagggcgatgatatcaacctgtacggccccggcacgccagtgcagcagtggatgacctaccgcgatgccgaaacctggcgatccatcgtgcgtaaaggtccgctgttcccgctgaactcactgatgtaccacgggatcgtcagcgcagagaacgcttactatggactcgagaaagtgcaaacagacagcgattttgccgatcaggtctggagctactttgcaaccggaactcagcttcaggagctgtacattacgccgtccatgctgaataaggcgaagtgggataccctggcgcaggccgcgaaatggtcgcgtgagaatgccagcgtgctggtggatactcactggattggcggtgacccaacttcgcttgaggtttacggctgggcctcatggagtaaagacaaagcgatttttggcttacgaaacccgtcggataaaccgcaacgttacttcctggatttaaccaaagattttgagatcccggcaggagagcgttcccagtttaccctgaaagccgtgtacggcagtaattcgaccgtaccagaggagtataaaaacgctgtggtgattacgctgcaaccgctggaaacgctggtgtttgaggcgatgccggagaaatagtgaggctttgacacggtgtaggccgggtaaggcgaagccgccacccggcaaaacaggcggcagggtcttactccccctgctgctccagcgcatatttatacagcgcatttttcttcacgccgtggatctccgccgccagcgccgccgcttttttcagaggaagttcagcctgtagcagggccagcgtacgcagcgcatcggcaggcagagcgtcttcctgcgctttgtggccttcgacaatcagcaccatttcgcccttgcggcggttttcgtcttctttcacccacgccagcagttcgccgaccggcgcaccgtgaatggtttcccacgttttggtcagctcgcgcgccagcaccacgtagcgcccttcgccccagacggtcaccatatcctccaggctttccagcagacggtgagtggattcgtagaagatcaacgtacgcggttcggcttccagatcctttaatacatcgcggcgacctttggatttagctggcaggaaaccttcgtagcagaaacgatcggacggcagacccgcagcgcttaacgccgcaatcgccgcgcacggccccggcagcggcacaacgcggatgccagcttcccggcaggtgcgtaccagatggtagcccggatcgttgatcagcggcgttcccgcatcggagaccagcgcgatgttctgcccttctttaagcttcgccaccagcgtttcggctttttgttgctcattgtgatcgtgcagggcaaacaaacgggcgttgatggcaaagtgttgtagcagtaaaccggtatgacgggtgtcttcagccgcaattaaatcaacagcttgcaatacggtgagcgcacgttgggtaatatcagacaaattcccgataggagtaggtacaatataaagctggccttgagaattatctgccgtttcgtgttgtttcattgtttcgtccgtattgccgatttaatattgagcattgcgtaaaaaaatcactggatacagtatggtaccgttaacgtttcttcgaaaaaaagccgcgcacagcgtgcccctcctgctggcagccctgatctttaccggctgcggcacccaggcacctgaccagagcactgctcatatgcagggatccgctcaggctgattctggcttttatctgcaacaaatgtcgcagagtacaaatgataccaggatcaactggcaattactcgccattcgtgcactgctgaaagaagggaaaacccagcaggccgccgagctgttcagccagttgccgcaggatcttaacgacactcagcgccatgagcagacgctgctgtcggcagaactgaaggtcgcgcaaaaagattacgacggcgcgaagaagatcctcggcaacatcgatctcagcacgctggataaaaaccagcaggcccgtttctggcaagccggtatcaccgctgagcaggatcgcccttccctgacgctactccgcgcgctgattgcccaggagcctctgctcgcgggtgcggacaagcaaaaaaatattgacgcaacctggcaggcgctcgcctccatgacccaggatcaggccaaggcgctggtaatcaacgctgatgaaaatgtcctgcaaggctggctggatctgcaacagatgtggttcaacaaccgcagcgatccgaacatgctgaaagccggcattaccgattggcaaaagcgttacccgcaaaacccgggagcgaaaatgctgccaacgcagctggtgaacgtgcaaaactttaagcccacctccaccagcaaaatcgccctgctgctgccgttaaacggtcaggcagcggtgtttggtcgcgccattcagcaaggttttgaagccgcgaaaaacggcaccaccgccgtcagcggcagcgcggttccggcgcaggctgcacaggcggcgaatgtgaatgacgttgtcagcccgtccgccgccgaaaccagcgacctgaccaccgcgcaaacccctgcgcagggcaccatgcagaatccggttactgccccaacgacgcagcctgctaccccagcgcctgcggcaacacaggccccggctgaaacaccggcacccgcgacggcagaacaacctcagccgcaaaccgagcagccggaacagcagccatcagcccagccgcaggctgtggtcaccaccagcgctaaccctggtgcagagttgaaaatctacgacaccagcgcccagccgcttgaccaggtgctggcgcaggttcagcaggacggggccagcatcgttgtcggcccgctgttgaaaaacaacgtggaagcgctgatgaagagcaacaccacgctgaacgtgctggcgcttaaccagcctgagcaggttcagaaccgcgccaatatctgttacttcgccctctctccggaggatgaagcccgcgatgcggcccgccatattcacgagcagggcaagcaggcgccgctgctgctgatcccacgcagcacgctgggcgatcgcgttgccaacgcgtttgcgcaagagtggcagacccttggcggtggcgtggtgttgcagcagaaatttggctcagcttccgaactgagagcgggcgtgaacggcggggcaggtattgccctcaacggtagcccggtatccgccagcctgccgcagcagcagagcgtcaccatcggcggtctgacgatcccggcgccacctaccgacgcgcaaataagcggcggcggtaaagtggattcggcgtacatcgtcgctacgccggaagagatcgcctttatcaaaccgatgatcgccatgcgtaacggcagccagagcggcgcaacgctctacgccagctcacgcagcgcacagggtaccgcaggcccggatttccgtctggaaatggaaggactgcaatacagcgagatccccatgctggcaggcagcaacccgcagttgatgcagcaggcgctgggcgcggtgcgcaatgactattccctggcgcgtctgtacgcgatgggcgtcgatgcctgggcgctggcaaaccacttcacccagatgcgtcaggtaccgggcttcgagcttaacgggaataccggcgatctgaccgccgatcaggattgtgtgattaacaggaagttatcatggctcaaataccagcaggggcagattgtcccggccagttaagccgtaaacagaccggcgacgcgtgggagttaaaggcgcgtcgctggcttgaaggcaaaggactgcgctttgtcgccgccaacgttcgcgggcgcggcggcgagattgacctgatcatgaaagacggtcagaccatcgtgtttgttgaagttcgctaccgacagtcgtcccgttttggcggtgctgccgccagcgtgacgctcgccaaacaacaaaaattattacagactgcccacttgtggcttgcccgccataatgggagttttgatactgtggattgccgtttcgatgtggtagccttcaccggaaatgcgatcgactggcttaaaaacgcgtttggcgaagacgcataaataagattttaaagggataccgtgctcgaacgaattaaagtgtgcttcacagaaagcattcaaacgcagattgccgcggcggaagcccttccggacgcgatctcgcgtgcagcgatgacgctggttcagtcgctgctcaacggcaacaaaatcctctgttgtggcaatggcacgtccgccgccaacgcacagcattttgctgccagcatgattaatcgcttcgaaaccgagcgcccgagtttacctgccattgcactaaacaccgataacgtggtcttaactgcgattgccaacgatcgtctgcatgacgaaatctacgccaagcaggtgcgcgccttaggccatgccggagacgtgctgctggcgatctccacgcgcggtaacagccgggatatcgttaaggcggttgaagcggccgtgacccgggatatgacgattgtcgccctgaccggttacgacggcggtgagctagctggcctgctggggccgcaggatgtggagatccgcattccttcgcaccgtagcgcccgcatccaggagatgcatatgctcacggtgaactgcttatgcgatctgatcgataacacgcttttccctcaccaggatgattaaggagttctcatgaaggttttatcggcccttgcagtcgtgatgtctgcattactgcttcagggatgcatcgctgccgctgtagtcggcaccgcagcggtcggcaccaaagcagcgaccgatccgcgcaccgttgggacgcaggtggatgacggtacgcttgagctgcgcgtaaacagtgcgctgtcgaaagacgagcagatcaagaaggaagcacgcatcaacgtgacggcttatcagggcaaagtgctgctggcaggccaggcgccaaatcctgaactcgcctcgcgtgccaaacagattgcgatgggtgtggaaggtacggcggaagtgtttaacgagatccgccagggccagccgattggtctcggcaccgcgtcatctgatacctggatcaccaccaaagtgcgttcccagctgctgggtaccgaccaggtgaaatcctcaaacgtgaaagtgaccacggagaacggcgaagtgttcctgctgggtctggtgacggaacgtgaagggaaagcggcagcggatatcgccagccgggtgagcggcgtgaaacacgtcaccaccgcctttacttacattaagtaattcccacctggctacaggcccggtaagcgctagcgccgccnnnnnnnnnnnnnnnnnnnnnnnnnnnnnnnnnnnnnnnnnnnnnnnnnnnnnnnnnnnnnnnnnnnnnnnnnnnnnnnnnnnnnnnnnnnnnnnnnnnnnnnnnnnnnnnnnnnnnnnnnnnnnnnnnnnnnnnnnnnnnnnnnnnnnnnnnnnnnnnnnnnnnnnnnnnnnnnnnnnnnnnnnnnnnnnnnnnnnnnnnnnnnnnnnnnnnnnnnnnnnnnnnnnnnnnnnnnnnnnnnnnnnnnnnnnnnnnnnnnnnnnnnnnnnnnnnnnnnnnnnnnnnnnnnnnnnnnnnnnnnnnnnnnnnnnnnnnnnnnnnnnnnnnnnnnnnnnnnnnnnnnnnnnnnnnnnnnnnnnnnnnnnnnnnnnnnnnnnnnnnnnnnnnnnnnnnnnnnnnnnnnnnnnnnnnnnnnnnnnnnnnnnnnnnnnnnnnnncgctagcgccgccgggcttttttcacacaagcgccatactccccacaataactccgctcaacgccaccagccccgcagtcagccacagcgctttcgccgggaatgacttacgcagcatgataagcgacggcaggctcaccgccggcagcgtgatgagcagcgccagcgccggtgcggtccccataccagccatcatcatggtctgaataatcgggatctccgccgcggttgggatcacaaacaggcacccggccaccgccatcgcaatcacccacatcagcgtgttgtcgatagcgccatccgcatgcgggaacagccagacgcgcgccgcccccagcaccagtacggccaggatatagaccggaatggtgctccagaaaagctgccacagcgctttgccccagcgagcaaagaaactgccctgcggctcgctgacgtccagctcaacggaggcaggcccggcctcgttgtctttcaccaggtgctgcaccagcgtagcgacaagcaccaccgtcagcaggccagccgccagacggataaacgcaaaatgccagccgagaacgaagcccataaacaccagcgttgccgggttcagcagggggttacccatccagaaggcaagcgcgccgcccatcgacacacgctgtcggcgcatacccgccgccaccggtgcggcgcagcaggagcacatcatgcccggcagggagaaaatcgtccccagcagcgtgccctgcaagcgcggctgtcccagggttttcaccagccagttacgcgggataagtacctgaatcagcgagcccagcaatacgcccaataccgccgctttccagacggcaagaaaatagaccatggcgtaatcccacgccgcgcgtagcgggctggaatcggcctgcgcgagaatcgatttaccgatgctgtgggtgtcggcggcggtgaaggctttaccgtagtacggctgccatttcacataccagaggccaatgatgaccacgagaaagaagagtgcgggcttccaccactgaacaggtgttgccgcctgagatgaagactgaccagtcataccattccccggaaggtgttatttaataagccggggaagtttacgcctcgccctgcgcgatttcacgcagttttgccgaagggataatattaaccccctcctgcgacggagccagcgcctcttttagcatcgccagcgcgacatcccgcgcctcgatggacttccagttacccggcagaatgcgaaacagcggagcgaaaaaagactcgttaaaacgacgttcgtcacggtgccccatcagcatggaaggccgcgcgatggtcaggcgctcccatttctgcgcgattaacgcctcttccattttgcccttcacctggttgtaaaaaaacggcgagcctgcgttcgcgccgtgcgcgctgaccaccaggaaatgttttgcgcccagctttttcgccgtcagggcggtatccaccaccagtgtgtaatccgcatggacaaaagcttctttactacccgcttcccgtcgggtggtgccaaggcagcaaaaggcgatatcaatgggatcctgcacctgcgccagcgcgtcggtgagctgtggatcgtgcgggttatagacgccggtgatatccaacagcgggcgacgcgtcggggcggcgatataattgatatgccgatcctggatcagcagccgcagcagatgtccacccaccagcccggttgcgccggtaatcagtacctgactcatcttatcccctttacagaattgtccgtttgcgttctgggcctgctctaccacacttaaaagtctgttaccggtaagtatttaccacaaacgggaaaaaacagtctgaagcgaaaacaacggaggaagcatgggtaaaaaaatcgcagtcttgattaccgacgagtttgaagattcagaatttacgtcgccagcagaggcattccgcaaggcgggccacgaggtggtcaccatcgagaaagaagcgggtaaaaccgtgaagggccataagggcgaagccagcgtgaccattgacgaatccattgataacgtcagcccgtcggatttcgacgccctgctgttaccgggcggtcattcaccggattccctgcgcggagacgagcgtttcgtcacctttacccgtgacttcgtcggcaccggtaaaccggtatttgccatttgccacggtccgcagctgctgatcagcgccgaggtggtacgcgggcgtaagctcaccgcggtgaagccgatcgttatcgatctgaaaaacgcgggagccgagttctacgatcaggaagtggtgaacgataacgatcagctgatcaccagccgtacaccggacgatctgccagcgtttaaccgtgaagcgctacgcctgctcggcgcgtaaccagtgcagcttcttgccaaagcccagggtgttgtcggtaaatttcagctcatcaaggcggatttcccacaccggggcttttagcgccgcggccaccgggaagcggcgcgtatagcgtttacgttgcgcgtcgctctcctcaccttccaggcgacgaatttcgcctttaaactggaccccgcggatcagcgcaacggttttaggctgaccgtttaccgtgcccgccacttttgcccgctggcccgtcatctgcgcatgccgcgttttatcttcgctcatcacgtaaaaggccacgcgctcgggatcgtagtaataaaaggcatttgcgcaccacatctcctcgtctttacagacgcaccaggtcacgacatgctgctttgccagccagcggttaatggcggccagtgtttccattttcgctctctctcatgctatggtgcgttcaccttaacatactgaatctgtttaccgtgtgctggtttctctatcttgtccgaaccgctgataacgcactctacaccgggatcactaccgatgtggcacggcgttttttacaacatcaaacggggaaaggggcgaaggcgctgcgggggaaaggtgaacttcagttagcgttttcagccgccgtgggcgacagatccctggcgctcaggctggaatactgcatcaagcagctgacgaagcgccagaaagagcgtctcgtcaacggggacgtctctttcgaggcgctacgcgaaagcctgcttaaaaacgattgaaatgatcgtggtactccaccagaccggtaacgccgtcgagcgcatcatccgccagaggatgcaccaggaaagatgtttccgtgcccggccagtggcagcgcagatcgtatctggacgctggcttaaaacctaaacgttcgtagaacgccggatcgcccagaacgacgacagcggcatagccaaattcattcagtgaatccagcccttcatagaccagctggcgagccaggccctggccacggtagttttcatccaccgccagcggcgccatgccgacccactgtaactcttcaccctgcacaatcaccgggctgaaggccacgtagccgaccacctgcccttcatcgtcggtggcaaccaggcccagcgtaatcaggccatcttcgcgaagatcgtgaaccagttgggcttcggcgtcgcctgcaaaagagcggcgtaacaacgcatcgatacccggcgcatcaatcccaatttcgactcgaatcagcatggctcacctactgaagtgtgtttactgtccggcggggtttttagcccggcctcaacgaaatctgccatttgcatcaacatcatacgcagcgctttcggcatctgctccagctcaatggcatccattaaatttttgacgtacagaccgagctccgtgtcgccttcaatcaccagacgacgctggaagaagagggtgtccggatcctgtttgcgcgcggcgatcatcagcagatcgctggcatccgcgctaaagctgacatccgcctcggcggtttcacggacgatcagccgatcgttctcaacggaagtaaaccagcgcaacccgatatcgcgcacttcaatctttaaccagcggccttccagaaactccagctcaccgtcctgtggcgcctggcggaactgccagctcagtacctgttccagcacctggcgtttaagcgcgaacggcgccagttttaccggcacgctcagcattgatggaccaaattgtacgagacgtgaacgcagtttatccagcacgagctttactccctgatagctatagtcctgctattttgccatatcccgacaagaagatagcggcgtaaatcaacaaaccgttgtccggtatacctcattattggtgccatcaatacgccattagctgccttaaatcaaaaattgtcgcgtatgggttaattaaaatcccagctcgttaacattttttacgatccctgcgatcgacaacatcgggataaattatggagctgctctgccctgccggaaaccttccggcgcttaaggcggccatcgaaaatggggccgatgcggtctatatcgggctgaaagatgataccaacgcccgccattttgcgggtcttaactttacggagaaaaagcttcaggaagccgttaacttcgttcaccagcaccggcgcaaactgcacatcgccatcaatacctttgcccatcctgatggctatgcccgctggcagcgcgccgtggatatggcggcccagctgggcgcagatgcgctgatcctggctgacctcgccatgcttgagtatgcggcagaacgttatccgcatattgagcgccacgtctctgttcaggcatcggccaccaatgaagaggccgtgcgtttttatcatcgacactttgacgtagcccgcgtggtgctgccgcgcgtgctttctattcatcaggttaagcaactggcgcgcgtcacgccagtgccgctggaggtttttgccttcggcagcctgtgcatcatggccgaaggccgctgctatctttcttcctatctcaccggggaatcgccaaataccgtcggcgcctgctcgcctgcccgcttcgttcgctggcagcaaacgccgcagggactggagtcgcgcctgaatgacgtgttaattgaccgctatcaggacggtgaaaacgcggggtatccgacactgtgtaagggccgctatctggtggacggcgagcgctaccacgcgctggaggagcccaccagcctcaacacgctggaattgctgccggaactgctggccgccaatattgcctcggtgaaaatcgaaggccgccagcgcagcccggcctacgtgagccaggtggcgaaggtgtggcgtcaggccatcgaccgctgcatggcggacccgcaaaactatgctccacaagcggcctggatggagacgctcggcgcgatgtctgaaggcacccaaactacgctcggcgcgtaccaccgtaaatggcagtgagataatcatgaaatattcattagggccggtgctttactactggccaaaagagacgctggaagatttttaccagcaggcggctaacagcagcgccgatgtgatttacctcggcgaagcggtgtgcagcaagcgccgcgccaccaaagtgggcgactggctggatatggcgaaaaacctggccggcagcggcaagcaggtggtgctctcgacgctggcgctggtgcaggcgtcctctgaactgggcgagctgaagcgctacgtcgaaaacggtgagttcctgctggaggcgagcgacctgggcgtggtaaacctgtgtgccgagcgtaagctgccgtttgtcgccggacatgcgctgaactgctataacgcggtgaccctgcgcctgttgctcaaacaggggatgacccgctggtgcatgccggttgagctctcccgcgactggctggccaacctgctgaatcagtgcgaagagctgggcattcgcaacaagtttgaagtggaagtcctgagctatgggcatctgccgctggcctactctgcccgctgcttcaccgcacgttccgaagatcgcccgaaagacgagtgcgaaacctgctgcattaagtacccgaacggccgcagtatgctgtcgcaggagaaccagcaggtgtttgtcctcaacggcattcagaccatgagcggttacgtctataacctcggcaacgaactggcgtcaatgcacgggctggtggatatggtgcgtctttcgccgcttgataccggtgttttcgccatgctggacgccttccgcgccaatgaaaacggcgcctcgccgctaccgttgaccgcaaacagcgactgcaacggttactggcgacgtctcgccgggctggaattgcaggcgtaaaaaaggctcactttgttaacaacggttatcattttttaatgcagtattaaagattgaccgtcgacaaagtgagctgttatgactgacaaaaccattccgttttcggtgctggatctggcgccgatcccacaaggctcctcggccagagaagccttcacgcactctctcgatcttgctcagcttgccgaaaagcgcggctatcaccgctactggctggcggagcaccacaatatggtgggcatcgccagcgccgccacctcggtgctgattggctatctggcggcgaataccaccactctgcacctgggctccggcggcgtgatgctgccgaaccacgccccgctggtgattgccgagcagttcgggacgctgaataccctttatccgggccgtattgatctagggcttggccgcgcgccgggcagcgaccagccgaccatgcgcgccctgcgtcgccatatgagcggcgatatcgataacttcccgcgcgatgtggccgagctggtggactggtttgacgcgcgggatccgaacccgcacgtgcgtcctgtgccggggtacggggaaaagatcccggtatggctgttaggctcaagcctgtacagcgcgcagctcgccgctcagctggggctgccgttcgcgttcgcttcccacttcgcaccggatatgctgcatcaggcactgcatctttatcgtacgcacttcaaaccgtctgaacgtctggagaagccgtatgcgatggtgtgtatcaatatcattgccgccgacagcaaccgcgacgcggaattcctgtttacctctatgcagcaggcgtttgtgaagctgcgtcgcggcgagacgggccagcttccaccgccggtagagaatatgcatcagctgtggtcggcctccgagcagtatggcgtgcagcaggctctgagtatgtcgctggtgggtgataaggcgaaagtgcgtcacgggctggaggcggtgctgcgtgaaacccaggcggatgagattatggttaacggccagattttcgatcaccaggcgcgtctgcattcgtttgatttggcgatgcaggtgaaagaggagttggtggggtagttttttgctttgcccggtggcgcttcgcttaccgggcctacattcttttctccctctcccatggggagagggccggggtgaggggttcagaccgcacgttttactgatacacaggcaacagattaaaactcgacagcacgtgcaccaccgcattgccgataccaaataccagaatcagcgcaatcatcggttttccgccccagacgcggaatttcgggctgccgaagcgcttacgtgatttgcgcgccagcagcgccggtacaatcgccgcccagatggtggccgccagtcccgcatagccgatggcgtacaggaaaccgttcggccacagcaggccgcccacaatcggcggcaggaaggtcaacagcgcggttttgaagcgccccatagcagagtcatcaaaaccaaacagatccgccaggtagtcaaacaggcccagcgtcacgccgaggaatgagctcgctaccgcaaagttcgagaagaccaccagaagcagatccagactgcggctgttcagcacgccgctcagcgcctgtaccagcacatcaatgttaccgcccttctgcgcaatgccgataaattccggacgcgggatgttacccatcgtccccagcagccagatcacatacagccccagcgccagcagcgtgccgtaaaccaggcatttcacgatggtgcgcggatccttgccgtagtacttcatcaggctcggtacgttgccgtggtagccgaacgacgccagacagaatggcagcgtcatcagcaggtacggcgtgtaggaggtgttcacttcggcaacgttaaacagcgtggccggcgtgacgtgccccagcaggctgccgaaggtcaggaagaaggtgatgacctttgcgcccagcacgatcgccgtcatgcggctgaccgctttggtgctcatccagacgataaacgccacgaccagcgcgaagcagagacccgccagacgcgccggaacgttcagcgacatctctgagaaggtgtgatgcagaatcgacccgctcgctgaaatgtacgcgtaggtcaggatatagagaacaaacgcgatggacagcccgttcaccaggttccagcctttgcccaacagatcccgggtgatggtgtcgaagctggagccaatgcggtagttcaggtttgcttcaaggatcatcagcccggaatggagcatgcagaaccaggtgaaaaccagcgccgccagcgaccagaagaaccacgcaccggacatgaccacaggcagggaaaacatcccggcaccaatgatggttccgccgatgatcaccacgccgccaagcagcgaaggtgacgtttgggtggtggttagtgttgccatgcggccttatctccagtgaaaaatgtggttctgcatttgagtgcgttgcactgtaccagtacaagagtacaaaaggaataaaaaaagccccgatagcaactatcggggctgtatattttactttacgtcagaagcgaaaggcttacgcgtcaccgaaacgacgacggctggcgccttcttcacggcgtggaccacggttttcgcggcgctcaccggagaaacgacggccttcaccaccgcgaccttcgctgcgaccgccttcacgacgctcgccaccgaaaccgcgaccaccgccacgacgttcgccgccacggtcaggacgtggctgtgcatcgcccagcagctgcatgttcatcggcttgttcaggatgcgggtgcgagtaaagtgttgcagtacttcgcccggcatgccttttggcagctcgatggtggagtgggaaccgaacagcttgatgttaccgatgtaacggctgctgatgtcgccttcgttagcgatcgcgccaacgatgtgacgaacttcaacaccatcatcacggcccacttcaatgcgatacagttccatttcgccagcgtcacgacgctcgcgacgtggacggtcttcaccaccacgctctggacggtcaccgcgtggaccacggtcgttacggtcgccacgacgttcgaagcgatcgtcacggtcacggaactcacgcttaggacgcatcggcgcatcaggtggcacgatcaggctacgttcgccctgcgccattttcagcagtgctgcggccagggtttccatgtccagctcttcgccttcagcgacaggctggatctgggacagcagcgcacggtactgatccagatcgctgctttccagctgctgctgtactttcgcggcgaatttttccagacggcgtttgcccagcagttctgcgtttggcagctcggcttctggaatggtcagcttcatggtgcgttcaatgttacgcagcagacgacgctcgcggttctcaacgaacagcagcgcacggcctgcacgacccgcacgaccggtacgaccgatacggtgaacgtaagactcggagtccatcgggatatcgtagtttacaaccaggctgatacgctcaacgtccaggccacgtgctgccacgtcggttgcaatcaggatatccagacgaccgtctttcagacgctccagagtctgctcacgcagggcctggttcatgtcgccgttcagcgctgcgctgttgtagccgctacgctccagggcttcagccacttccagggtcgcgtttttggtacgaacgaagataatcgccgcatcaaaatcttccgcttccaggaaacgcaccagcgcttcgtttttgcgcatgccgtatacagaccagtagctctggctgatgtccgggcgagtggtcacgctggactgaatgcgcacttcctgcggctctttcatgaagcggcgggtaatgcgacggatcgcttctggcatggttgcagagaacagagcggtctggtgaccttccgggatctgcgccatgatggtttctacgtcttcgatgaagcccatacgcagcatttcatcggcttcgtccagtaccagaccgctcagtttagagaggtccagggtaccgcgcttcaggtgatccagcagacggcccggcgtaccgacaacaatctgtggaccctggcgcagggcgcgtaactgcacgtcataacgctggccgccgtacagggctaccacgtttacgccgcgcatatgtttagagaattccgtcatggcttcagcaacctgaacagccagttcacgggttggagccaggacgaggatctgcggcgcgcgcaggtccggatcaatgttgttcagcagcggcagcgagaatgctgcggttttaccgctaccagtctgggccatgcccagcacgtcacgaccagaaagcaggtgtgggatacactcagcctggatcggagatggtttttcgtaacccagatcgttaagggcttcaaggataggagccttcaggcccagatctgcaaaagtggtttcgaattcagccatgtagtacaagtgcctcgatattaatggcggccagtctacttagctcatcgtgaaaatgattagcaattttcattgaaaagtgtgaaccggctcaaattaggtgtattgacgaacaacaacgccctcaccagtgaaggtgatggcaatcaaaagattacgggctgatatttatgtcgtcagctattgctggtccgattctgccaggtcgtcttgctcctggcccaagagcgataattccaacaatgcataacggtgctcaacgaagttatgtacgttgttagcaaccgctaatttgaacagtgccgtagcgctgtccatatcccccagacttaggtagtacttacctaaatagaagttggtttcactgagatgctcagcgagcgaggtgttatccgttgcgtccgccttgaggcgttccatcagcgttgcttcgctaatgttgcccaggtagaactcgacaatgttccatccccactgttccttgtccgatttatcgaagcgctgtttcagtgcttctttggcctgcttctcatcgagcttctgctcaacgatgtaaagccacaggctgcggaaaggatcattaggatcgtcttgataaaacgccagcagatcatcttgcgctaacttatcacgaccgccgtaatacaatgcgataccgcgattcaagtgcgcgtagttgtaagttggatcaagctcaagtacagaatcaaacgcttcataggcagcatcaaaattgcctgcctgcgttaaataaatgcctaagtaattgaatacttcaggcatatcaggtcgaatcgccagcgcttgtgaaaaatcatttcgcgccagtgccctcagaccgagactatcatacaacactccgcgctcatataaaagctgtgcgcgttcgtcatcggttaaagcccgactggcaagtatttgttccatgcgtgccagaatgacttcctgctgcaaagtcggttgcaatggcactgcgaggacttcgctcttacgccaggcagagttgctgcatcctgccagcgttaaagctgtcgcaacgaaacaccagcgcaaaaaaggcttcatttcccactcccgaagacaactattgatgaacgtcctgtcccccggcggcttaacaaggcgtcctgcctgataataagccctccgcctgcgcggagggcaaatggcaaccttactcgccttgctgttcagcagccggggcttccggtgccgcagcaggctgagactgctcggttgcttctttaatgctcagacggatacggccctggcggtcaacttccagaactttcaccggtacttcctgacccatttgcaggtaatcggtcactttctcaacgcgcttgtcagcgatctgagagatgtgtaccagaccttctttaccgccaccgatggcaacgaatgcgccaaagtcaacgatacgggtcactttaccattgtagatacggcccacttcgatttctgccgtgatctcttcgatacgacggatagcgtatttcgctttctcgccgtcggttgctgcgattttcacagtaccgtcatcttcgatttcgatggtggtgcccgtttcttcggtcagtgcacggataacagaaccgcccttaccgataacatctttgatcttgtctggattgatcttgatggtgtggatacgtggagcgaactgagaaatatcaccacgcggcgcattaatcgcctgttccatcacgcccaggatgtgcagacgcgcacctttagcctggttcagagcaacctgcatgatctctttggtgataccttcaattttgatatccatctgcaaggcagagataccgtcacgggaacccgctactttgaagtccatatcgcccaggtggtcttcgtcgcccagaatgtcagacagaacaacgtagttgtcgccctctttcaccagacccattgcgatacccgcaacggcggctttaattggcacgcctgcatccatcagcgccagagaggcaccacacacggaagccatagaagaggaaccgttggattcggtgatttcagacaccacacgtacggtgtacgggaatttgtctgcttctggcatcactgccagcacgccgcgcttcgccagacgaccgtgaccaatttcacgacgcttcggtgagccaaccataccggtttcgcccacagagtacggagggaagttgtagtggaacaggaagctgtcagtacgctcgcccatcagttcgtcgatgatctgtgcgtcacgtgcggtacccagggtcgcggttaccagcgcctgcgtttcaccacgggtgaacagcgcagaaccgtgagtacgtggcagtacgccagtacgcacgtccagaccacggatcatgtctttttcacggccatcgatacgcggctcgcctgccaggacgcggctacgaacaacgtttttctcgatggcgtgcaggatttcgccaatctcgttagcgtccagcgtttcgtcttcggcaaccagggtcgcggtcacttcagatttgatcacatcaacctgagcatagcgctcctgtttgtcggtgatgcggtatgcgtcgctcagacgagattctgccagtgcagcaacgcgtgcgttcagcgcctcgttcaccgcttctggctgccagtcccaacgtggtttaccggcttctttcaccaggtcgttgatgttctgaataacgatctgctgctgctcgtggccaaataccacagcgcccagcatctgatcttcgctcagcagttcagcttcggattcaaccatcagaaccgctgcttcagtaccggcaacaaccaggtccagcttactctctttcagctcttcctgagttgggttcagtacgtactggtcgttgatgtagccaacgcgcgcggaaccgattgggccattgaatggaataccagacagtgacagggccgcagatgcgccgatcatagcaacgatgtccgggttaacctgtgggttaacggaaacaacggtcgcaataacctgaacttcgtttacgaagccttccgggaacagcggacgaaccgggcggtcaatcagacgcgcgatcagggtttcgccttcgcttggacggccttcacgacggaagaagccacccgggattttaccggcagcgtaggtacgctcctggtagttaacggtcagtgggaagaagtcctgacctggtttagcttttttctggccaactacggtaacgaatacagcggtgtcatccatgcttaccataacggcagcagtagcctgacgcgccatcatgccggtttccagcgtgacggtatgctgaccatactggaatttacgaacgatcggattcagcaaaattctgtcctttcttaaatgtttgaaagcacacctcaggtgtgctgacgatttaacccgaccttcttcgcatcctcgcgactaatgacaaccgacaccctcatgggtgaagcctctcattagccgcgcgaacctctgcaatgaagatcatttatagcaacaatacaatagtttccattgaattgctgccgtctggttgaaaaaaggggccatcaggcccccttttctgaaactcgcaagaattagcgacgcaggcccagacgctcgatcagcgcggtgtagcgtgcaacatctttacgcttcaggtagtcgagcagtttacgacgctgagaaaccatacgcagcagaccacgacggctgtggtgatcttttttgtgctctgcaaagtgaccttgcaggtggttaatctgtgcagtcagcagtgcaacctgaacttcggtagaaccgctgtcgttagtaccacgaccaaactcagaaacgattttagctttagcttcaacgcttagagacattttcaaactccaaagtataaagaatgtaaggatgccgatctctaattcagctatcccatgtacgccccgcagattgttaaacaatttaccaggcgttaagcggcgatattctactcgtctcccctgcttatcgcaaggtgaggcgttatcaccgtcacgcttcgaccggatattcgacgaccagacgacgcggcgccacacgcccttcgccgtccatttcgcccataccgatgaatttcccttcgtcaccttccgtcacgcgtaccaggccctcaagcggcgcccccgatgtgcgaaccgggtttccgttcttaaagtaaacggacgatgttaaaggaagattaacaaccgggaagtccactgccggactgtccattggcatcagcagcgggtccagcagatcggctggcgcaacgccctgcgcttgcgcctgctcaaccagggcgtgcagatgctcaagcgtcaccatgcattcgaccggatatttgctgaccgccagacgacgcagataaatcacatgcgcgccgcagcccagcttttcaccgaggtcatcaatgatggtgcggatataggtccctttcgaacagtgtacttccagctcgagttcatcaccttcgtggcgaatgaacagcaactcatacacggtaatcggacgagcttcacgcggaacctcaatgccctgacgcgcatattcgtagagctttttgccctgatatttcagcgccgaatacatcgacggcacctgtagcgtatcaccacggaagctgtccagcgccgcatcaagttgctccgcgctgaaggtcaccgggcgctcttccaccaccaggccatctgcatcagaggtatccgtgcgctggcccagtttggcaatcacgcggtagcgcttatccgaatccagcaggtactgggaaaactttgtcgcttcccccaggcagatcggcagcatgccggttgccagcggatccagcgcgccagtgtgccctgcacggttggcgttataaatacgcttcactttttgcagtacgtcgttgctggatgcgccctgtggtttatccagcaacagcacgccatgcacgtcacgaccgcgacgacgaggacgactcatcagtcctccttgctgtcgtccgccgggttaacacgacgctcatcgtcatgtttcaccacgctggtcaccaggttggacatacgcataccttcaaccagcgagttgtcgtagaagaaggtcagctctggcacgatacgcaggcgcattgctttgccaagcagagagcggatgaaaccagaggcttcctgcaacgctttaatgccgttcttcacggcgtcttcatcctggtcattcaggaaagtaacaaacactttggcgtacgccaggtcgcgggacatttccacgcccgacacggtggtcatcatacccacgcgtggatctttgatttcacgttgcagaatgagagcgatctctttctgcatctcctgcgcgacgcgctgtgggcgaccaaattctttcgccataataaattctccagacaaaaaaggggcttaagcccctttttaaaattactgccgggtggcgcttcgcttacccggcctacgctaattaatcttcagttgacgaagattacgcgatggtacgctgaatttcgatgatctcgaacacttcgatcatatcgccaacgcgaacgtcgttgtagttcttcacgccgataccacattccatgccgttacggacttcgttaacgtcatctttgaagcggcgcagggattccagctcaccttcgtagataaccacgttgtcacgcagtacgcggattgggttgtgtcgcttgatggtcccttcggtaaccatacagcccgcgatcgcaccgaatttcggtgatttgaacacgtcacgtacttcagccagaccgatgatctgctgtttcagctcaggagacagcatgccgctcatcgctgctttcacttcgtcaatcaggttatagatgacggagtagtaacgcagatccaggctttcagcatcaatcactttacgcgcagatgcgtcagcacgaacgttgaagccaaccaggatcgcgttggacgctgctgccagggttgcgtcggtttcggtgataccacctacgccagaaccgatgatcttcactttcacttcgtcggtagacagtttcagcaaggagtcggagatcgcttccacagaaccctgaacgtccgctttcagaacgatgttcacttcgtgaacttcgccttcggtcatgttggcgaacatgttctcgagtttagatttctgctgacgagccagcttcacttcacggaatttaccctgacgatacagagcgacttcacgcgctttcttctcgtcacgtaccacggtgacttcgtcaccggcagccggaacaccggacaggccgagaatttccactggaatggacggacccgcttccagcacttcctgacccagttcgttacgcatcgcacgaacgcgaccgtattcgaaaccacacagaacgatgtcgcccttgtgcagagtaccttcgcgaaccagaacggttgcaaccggaccacgacctttatccaggaaggattcgattaccgcgccgctcgccatacctttacgaaccgctttcagctccagaacttcagcctgaagcaggatagcgttcagcaggtcgtcgataccggtacctgcttttgcagatacagggatgaactgcgcttcaccgccccactcttccggcataacgccgtactgggacagttcgttcttcacgcgatccatatcggcttctggcttatcgattttgttaactgcgacaaccagaggcacctgcgccgctttcgcgtgctggatagcttcaatggtctgtggcatcacgccatcgtcggcagcaacaaccagaacaacgatatccgttgcctgagcaccacgagcacgcattgaggtaaacgctgcgtggcctggggtatccaggaaggtgatcatgccgttttcggtttctacgtggtaagcaccgatgtgctgggtaataccacccgcttcgccggaggcaaccttagtagaacgaatgtagtcaagcagagaggttttaccgtggtcaacgtgacccatgatggtcacgaccggtgcgcgcggttcagccgctgcgcccgtatcacggtcgctcattactgcttcttccagctcgttttcacgacgcaggataactttgtgacccatctcttcggcaaccagctgtgcggtttcctggtcgatgacctggttgatggtggccattgcgcccagtttcatcatcgctttgatgacctgagagcctttcaccgccatcttgttagccagttcgccaacggtgatggtttcgccgatcacaacgtcacggttaacggcctgagcaggcttctggaagccctgctggagagcggaacctttacgcttgccgcctttaccgccgcgaaccgctgcacgcgcttcttcacggtcagcttttgattcagcgtgtttgttaccttttttcgcaggacgcgcagcttttgcactgcgagtacggccacgaccaccttcaacttcgcggtcgttgtcgtcttctgcctgacgcgcatgctgagacgtggtgacgtgataatcgctggtatcttcagttggttcagcggtattcacaccgttcttctcgttttcttctgccatgcgacgcgcttcttcggcgacgcggcgagcttcttcttcaagcttgcggcgggcttcttcttccgctttacgcttcagctcggcagcttcattttcacggcgggctttttcagcctgggcagttttggtcatttcgtcggtctgttgattgctcactttgtctttttccgcagcgtcacgcttcgctttttcaccggcgtcgcgtttcgctttttctgcggcctcacgttcagcttttaattctgcttcacgtttggcagtggcttctgcctcacgctgagcttgttcttccgcttcacgctgtgcctgctcttccgcggcaaggcgttctgcctcttgcggatcacgttttacaaaggtgcgcgtcttgcggacttcaatttgtaccgacttgcttttgccaccggtaccagggatgttcaacgtgctacgcgttttacgctgtagcgttaacttgtcaggcgtagagccgtgttcacggttcaggtgcgctaacaaggtttgtttttcttgcgcggtcaccgagtcatcagcggacttcgggatccctgcatcagcaaattgctgtaccaggcggtccacggaggtctgaatctcagcagccagcgattttacagttacatcagtcatgctgttccttcctgctacagtttattacgcttcgtcgccgaaccagcaaatattacgtgcggccatgatgagttcgccggctttctcgtcggttaaaccttcgatatcggccaggtcatcaacgccttgctcagcgagatcttccagcgtacaaacaccacgggcagccagcttgaacgcaatcgcacgatcaagaccttccagattcagcaggtcatcagccggcttcttatcgccaaggctttcttcctgagccagcgccagggtggtcagtgcgtttttagcgcgttcacgcagggcttcaacggttggttcatccagaccgtcaatttccagcagctctttcattggcacgtaggccagttcttccagcgtagagaaaccttcttcaaccagcacagtggcgaagtcttcgtcaatgtccaggtatttggtgaaggtatcgatcgccgcgtgggcttcagcctgatgcttggcctgaaggtcatcaacggtcatcacgttgagttcccagccgctcagctgtgacgccagacgtacgttctgaccgttacggccaatcgcctgcgccaggttgcccgcttctacagcgatatccatggtgtgtttgtcttcgtcaacaacgatagacgccacatcagccggtgccattgcgttgatcacgaactgcgccgggttatcgtcccacagaacgatatcaatgcgctcgccgcccagttcggtagaaaccgcctgaacacgtgcgccacgcataccgacgcaagcaccgaccgggtcgatacgcttgtcgttggttttcaccgcaattttcgcacgggaacccggatcgcgggccgccgctttgatttcgataacttcttcgccgatttccggcacttcgatacggaacagttcaaccagcatttctggtttagaacgcgtcacgaacagctgtgcaccacgcgcttcaggacgtacggcatacagcacaccacgaatacggtcgcctgggcggaagttttcacgcggcagcatgtcttcacgcaggatcacggcttcagcgttacccggcagcccttcggatttgatctccagagagatgttgtcgcggttcactttcttcaccacaccagtgatgatttcgccttcctgatcgcggaactgatcgacaaccagcgcgcgctcggcttcgcgcactttctgcacgataacctgcttcgcggtctgggtggtgatacggtcgaaggtaacagattcaatctgatcttcaacgtagtcacccacgttcagactttcgtcttcaaaacgtgccgcttccagcgtgatctctttggtcggttgggtcacttcttcaacgattacccaacgacggaatgtatcgaagtcaccgcttttacgatcgatttctacgcgaacatcgatctcttgttcgtattttttcttggttgctgtagccagtgcactttccagcgcttcgaaaatcttctcacgcggcagtgatttctcgttggagacggcttcaacaacagccaaaatttctttgttcatcgcgggcttttcacctcaatccagactgttaaaagtggggaaccaggttcgccttctggatattactcagcgcgaacacttcatctttgccttcgactgtcaccgtgatcatttcaccatcaacggctttgataattccctgccatttacggcggttctgtacggccatacgcagaacgagagccacttcttcaccggtaaagcgcacgtagtgctcgtccgtgaacatcggacgatcgaggccaggtgaggaaacttccaggttgtacgcaacggtaatcggatcttcaacatcaagaaccgcactcacctggtggctgacatcagcacaatcatcaacattgatgccatcttcactatcaatatagatgcgcagtgtggatgtacggccgcgaacgaattcgatgccgaccagttcgtagcccagtgcttcgaccggcgcagtaatcatctctgttaatttttgctctaatgtggacaagcccacccccaagacataaaaaaagggcgtaaagcccagttattctgtagtcagataacaaaaaaccccgataaatcggggctttagataactgaaccctatagccacaactgtggcctggagcactctccgaaagcattttttcaaatccagctacgaaggctctaagtcttcacagtatatttgaaaaagaactttatgggaaagtggttgcgggggccggatttgaaccgacgaccttcgggttatgagcccgacgagctaccaggctgctccaccccgcgcctgaaacgtggcaaattctacgcgttttggacagaatttgcaaataatgctgggatttggtaccgaagacgggacgtaaaatcggcgttcagtatattgatagttgaccccacctgtcaacccaacttcagccagggcaataaaagggaaatttttacaaaaaacgcacacgtctctttcggtcgtcgataaaagatgattaaatgaatactcacttattttgcataaacatgcatcgagagcgaaagcggtctctaatcagtcaatcaagcagggttttattatatgacgacgattctcaagcatctcccggtaggacaacgtattggcatcgctttttctggcggcctggataccagcgctgcactgctgtggatgcgccagaagggagcggttccttatgcatatactgcgaacctgggtcagccggacgaggaagattatgacgcgatccctcgtcgtgccatggaatatggcgcagagaacgcacgtctgatcgactgccgtaagcagctggttgccgaagggattgccgcgatccagtgcggtgctttccataatacgaccggcggcctgacctatttcaataccaccccgctgggtcgtgccgtcaccggcactatgctggtcgccgccatgaaagaagatggcgtgaacatctggggggacggtagcacctataaaggcaacgatattgaacgtttctatcgttatggcctgctgaccaacgccgagttgcagatctacaaaccgtggctggataccgacttcatcgacgagctgggtggtcgtcatgaaatgtctgagtttatgattgcctgcggctttgactacaagatgtcggttgagaaagcctactcaaccgactccaacatgctgggtgcgacgcacgaagcgaaagacctggaattcctgaactccagcgtaaaaattgttaacccgatcatgggcgtgaagttctgggatgagaacgtgaagatcccggcggaagaagtgaccgtgcgtttcgaacgtggtcatccggttgccctgaacggtaaaaccttctccgacgatgttgaactgatgctggaagcaaaccgcatcggcggtcgtcacggtctgggtatgagcgatcagatcgaaaaccgtatcatcgaagcgaaaagccgtggcatttacgaagcgccggggatggcgctgctgcacatcgcttacgagcgtctgctgaccggtattcacaacgaagacaccatcgagcagtatcactctcatggccgtcagctgggcaaactgctgtatcagggtcgctggtttgatccacaggcgctgatgctgcgtgacgccctgcaacgttgggtggcaagcgcaatcaccggcgaagtgacgctggaactgcgtcgcggcaatgattactccatcctcaataccgtgtctgacaacctgacctataaagcagagcgtctgaccatggagaaaggtgagtcagtgttctctccggacgatcgtattggccagctgaccatgcgtaacctggacatcaccgatacccgtgagaagctgttcaactatgttgagaatggcctgctctccgccagttccggtaatggcctccctcaggttgagaacctggaacacagcgataagaaataatcgacagcaagtcatgcaaaaggcgcccattgggcgccttttttgtggtcttcgtaggcccggtaagcgcagcgccaccgggcaaaacggcgggtggcgctgcgcttacccgccctacaaaagatcggatacacagaatgtacagacgaaaaaaaagacgtcttgcgacgtctttcttctggaatattggtaccgaggatgggactcgaacccacaagcccgttagggcactaccacctcaaggtagcgtgtctaccaattccaccacctcggtacggaatacttactgcgggatatcgctggttggcttagccggtgcagctggctgagtttgctcagtttttgctggcgcgctcagattttcccactcgcttcctttactggtcttgttgctgttgatattgcccagcaccagactgatgatgaagaacagcgtagccagaatcgccgtcgtacgggtcatgaagttcgcagaaccacttgaaccgaacagcgtaccggaagcgcctgctccgaaggaggctcccatatcagcgcctttaccttgctgtagcataatcagcgctacgagagcgatggctacaataaggaaaataactaaaagagcttcgtacataatcaacctgttccttgcggatttgccgcataccaatgcttcgaccaattagcaggattttgtttcccactgaagcgggtgtgaatactaaccaaagcgaatcaccttcgcaagggcattttcgaggcattgtatcaactgcggaaaaaaacagcaaaaagccattcattgcttaaaacaaaggcggcaaacgccgcctttttaaacacttattctgaaagattatgcagctttgactgcatccgcaatacggtgcgcaaattcagttacctgcgcttcgtcttcgccttccaccatcacgcggatcagcggctcggtacccgacttacgcagcaggacgcgcccacggctgccaagagtcgcttccacctctgccatcaccgctttcacgttatcattttccagcgggtcgcctttacccgcggtgaaacgcacattgacaagaatctgcgggaacattttcatgccgctgcacagatcgtgcaggctcatatggttacgcgccatcgcggcaacaacctgaagcgccgccacaataccgtcaccggtggtggttttatcgagcaggatcacgtggccggagttttccgcgccaatacgccagcctttctcctggagtttttccagcacgtagcggtcacccactttcgcacgaacaaacgggatgcccagctgtttcaacgccagttccaggcccatattgctcatcagcgtgcccaccgcgccaccgcgcagttgcccctgacgcaggccttcacgggcaatgatgtagaggatctgatcgccatcgaccttgttaccttcgtggtcaaccatgatcacacggtcaccatcgccatccagggcaatacccagatcggccttttcagccagcacacgcgcctgcaaggcacgcacgtctgtcgcgccgacttcttcgttgatgttcagaccgtccggctcgcagccgatagtgatcactttggcacccagctcgcggaacacattcggcgcaatgtggtaagtcgcaccgttggcacagtccaccacaattttgaggtgtgccaggctcagctcattcgggaaagtgcctttgcagaattcaatgtagcggcctgcggcatcgacaatacggtttgctttacccagctcagcggagtcaacacaggtgatctctttttccatttccgcttcaatcgcctcttccacgtcatccggcagtttggtgccgtcgatggagaagaatttgataccgttgtcatagaacggattatgggaagctgaaatgacgatgcccgcttccgcacggaaggtgcgggtcagataggcaacagcaggggtcggcattggccccgtaaaggaagctgaaagccccgccgccgccagcccggcttccagcgcggactccagcatataacccgaaatacgggtatctttcccaataatgatcttacgggagccatgacgcgccagcactttccccgctgcccagcccagcttcaggacaaagtcaggggtaattggcgcatcgcctacgcgcccacggatgccatcggtaccaaaatatttacgattactcatagcgtttgttttccttcgctgccagtgtggcttctaccacacgcatggcttctactgtttcttttacgtcatggacgcgaatgatgtgtgcaccttgcatcgcggcaatcaccgcgcaggccagactgccgctcagacgttcgctcggcccgacattcaacaactgaccaatcatcgattttctcgacattcccaccagcagtggcaggccgaactgatgaaactctgataagcgcgcaagcaacgcgtaattgtgtgagagatttttaccgaaaccgaagcccgggtcgagcagcaatttctcttttgcgatacccgcacgttcacagcgttcgatatgctcaataaagaagcgggtgacgtcggcaaacacatcttcatattttggcgcctcctgcattgtcttaggctgaccctgcatatgcatcagacacaccggtagcccggtttctgcggcggcttcaatcgcgcccggctcggtcagcgagcggatatcattgataatgtgagcgcccactctcgccacttcacggatcacttcgggtttggaggtatcaacggagatccacacttcaaagcgccgggcgatagcctccaccaccggcaccacgcgcgccagctcttcttccaccgaaacctccgccgcgccaggccgcgttgactcccctccaacgtcaatgatggtggcacccgcgttaatcattaaattcgcgtgtttaaccgcgtcgataagcgaattatgcgtgccgccgtcagagaaggaatcaggcgtgacattcaggatccccatcacatggggatgtgaaaggtcgagatgcgagtcctgggcgaatagtttcatggtgaagtccctgggattaatgtggttaaacagataagaaaaaccccggagcaagctccagggtttgagatacagacaaacgcttcaacagcagtgacttacttgtcgcccaactgctctgacatggtgttgcccgggtttggcgtacgcggttcatcgaccggacgcggcgcacgcggggtgccattgttgtcagaattgttagacgcgcctgggtcttcccagcctgccggcggacgcacttcgcggcgcgccatcaggtcgtcaatctgcggtgcatcgatggtctcatatttcatgagcgcatctttcatcgaatgcaggatgtccatattgtcgttcaggatctgacgggcgcgagcgtagttacgttcaatcagcgctttcacttcctggtcgatgatacgtgccgtttcatcggacatatgtttcgcttttgccacagagcggcccaggaatacttcgccctcttcctctgcatacagcagcggaccgagtttgtcggagaagccccactgagtcaccatgttacgcgccaggtttgtcgccactttaatatcgttcgacgcaccggtggaaacatgttccgcaccgtagataatctcttcagccagacgaccgccgtacagggttgaaatctggctttccagcttctgacggctggcgctgatcgcgtcgccttcaggcaggaagaaggtcacacccagcgcacgaccgcgcggaataatcgtcaccttgtgtacgggatcgtgttccggcaccagacgaccgataatcgcgtggcccgcttcgtgatatgccgtggactctttctgcgcttccgtcatcaccatggagcgacgttccgcccccatcatgattttgtctttcgctttctcgaattccaccatggacaccacgcgcttgttaccgcgagcggcaaacagtgctgcttcgttgaccaggttagccagatccgcaccggagaagcctggagtaccacgcgcgatgattgccgcgtcgatatctggcgccagcggtacgcgtcgcatatgcactttcagaatctgttcacgaccgcgaacatccggcagaccgaccacaacctgacggtcaaaacggcctggacgcagcagcgcagggtcgagtacgtccggacggttagttgccgcgataacgataataccttcgttaccttcgaagccgtccatctcaaccagcatctggttcagcgtctgctcacgttcatcgtgaccaccacccaggcctgcgccacgctggcggcctacggcgtcgatttcatcgatgaagatgatgcacggtgctgccttcttagcctgctcgaacatgtcacgcacacgagatgcaccgacacccacaaacatttcaacgaagtcagaacctgaaatagtaaagaacggcaccttcgcttcacccgcgatggcttttgccagcagggttttaccggtacccggagggccgaccatcaggacgcctttcgggatcttaccgcccagtttctggaaacggctcggctcgcgcaggtattcaaccagttcacccacctcttcttttgcttcgtcacaacctgctacgtcagcaaacgtggtcttgatctggtcttccgtcagcatacgcgccttgctcttaccgaacgacatggcacctttgccaccaccgccctgcatctggcgcataaagaagatccagacgccgataagaagcagcatcgggaaccaggaaatgaagatagaagccagcaggcttggttcttccggcggctcgcctaccactttgacgtttttggtcagaaggttatcaagcagcttaggatcgttcaccgggatgtaagtcgtgtaacggttactatctttcttggtaacgttgatctcacgtccgttgatacgcgcttcgcgaacctggtcctgattgacctcttgcaggaaggtagaataatccaccttgcggccattcgactcgctgggcccaaagctctggaatactgacatcagcacaacggcaatgaccagccagagtattaggtttttcgccatgtcactcaagggattaacctcatattacaactgtgttaaaaacagcgtcaggatactctatatccagtttcattcaaactttcgcctgaaatctaccggttatcattttcgcccggtcgctacaatatacacttcacgggaacgggcccgggaagagtccggcttacgaactttgaccttcgcaaacagggagcgaatttccttaagatactcctcgaaaccttcgccctgaaacaccttcacaacaaaactaccaccaggcgctagtacatcacgacacatttctaacgctagttccaccagatacatggcgcgggggatatccaccgccggtgttccacacatatttggcgccatatccgacatgacaacctggaccttactgtcaccaacacgatcaagtagtgctttaagcactaattcatcacgaaagtcgccctgaaggaagtcgacaccgacgatgggatccattggtaaaagatcgcatgcgatgattcggcccgttccgccgatctgcgtaaccgcatactgggaccatccgccaggtgccgcaccgaggtcgaccaccgtcattcccggtttaaaaagtttgtcactttgctgtatttcatcaagtttaaaccaggcgcgggaacgcaacccctttttctgcgcctgttgaacatatttatcgctaaagtgttcctgaagccagcggctggagctggcagaacgctttttacctgtcatttaacatttccgtcctggttcatcgttgcttgcctgtgacgtaaatttctacgcagctatttggcgatattagggagatggcggtagaatgaaccgttttcaatcccaacgtaagcaaaaatatacgatgaatctgagtactaaacaaaaacagcaccttaaaggtctggcacatccgctcaagcctgtagtgatgcttggcaacaatggtttgaccgaaggggtgcttgccgagattgaacaagcgctggaacaccacgagctgatcaaggtgaaaatcgcctctgaagacagagacactaaaaacctgatcgtggaagccatcgtgcgcgaaaccggcgcctgtaatgtacaggtcatcggtaaaacgctggtgctctatcgcccatcaaaagagcgcaaaatctcgctgccacgttaaggatatcctgaatcgaacacattttgtgtgtgaaacgagggatttctttcagcaggcgagcaaaatgccatgctccttgagttgataaaaggccgctatgcggcctttttcttttctttacaatgtatcaacatcttagtagagaagcgaattacaggtattcaaccttaataatttcgtattccacttcaccaccaggggtgcggatggtgaccacatcgtcctgctctttgccaatcaggccacgagcaatcggcgagttcaccgaaatcaggttctgtttgaagtccgcttcatcatcacccacgatgcgataggtctgctcttcgtcgttgtccagattcaggacgctgacggtagagccgaagatcacacggccattatttggcattttggtgatatcgataacctgcgcgttagacagtttcgcctcgatatctttaatgcgcccctcacagaaaccctgctgctcacgcgccgcgtggtattcagcattctctttcaggtcgccatgctcacgcgcttccgcgatagcggcgatgatttcagggcgacgcacggatttgagaaaatccagctcttcgcgcagtttttcggcaccacgtaaggtcatcggaatagcttgcatttgttatacctcttaaacattcctgttgggagcagtgttccctgctccagcccacctgaacaggccagaagcaaaaagaaaaccgacccgggagcaacgccccaggtcagcagcaatttttcaatttgatacgcattttaccgcgaagttcactatgggtcatcgtttactttacagtgccatgcaccgtagtatgacggtttgttttcgggttgttagcgcgagattatgcgattttccagttttatcatcggattgactaccagtataacgttcaccgttcaggccgcgaatgttgatgagtacattaatcaactgcccgccggcgcgaaccttgccctgatggtgcagaaggttggcgcgcaggctcccgagattgactatcacagtcaacagatggcgctgcctgccagtacccaaaaggtgatcactgccctcgccgccctgctccagctcgggcctgacttccgttttactaccacccttgaaaccagaggtaacgttgagggtggcgaactgaaaggcgatcttatcgcccgttttggtggcgatcccacctttaagcgccaggatgtccgcaatatggtggcggtactgaaaaaatccggcgtaacaaaaattgatggcaacgtgctgatcgacacctccattttcgccagccacgataaagcgcctggctggccgtggaacgacatgacgcagtgctttagcgccccgccagccgccgccatcgttgaccgtaactgcttctccgtatcgctttacagcgcgccaaaaccaaatgacttagcttttatccgcgtggcctcatactacccggtcacgatgttcagccaggtgcggacgctggcgaaaggctccccggaggcgcagtattgcgagctggacgtggtaccgggcgatctcaatcgctatacgctcaccggctgcctgacccagcggtccgatcccctcccgctggccttcgccattcaggatggcgcgggctatgccggtgccatttttaaagatgaactgaagcaggcgggcataacctacaccggaacgctgctgcgccagacgcaggtgaatgagccaggcacggtgatcgccagcaaacagtccgcgccactgcatgatttgcttaagattatgctgaaaaagtcggataacatgattgccgacacggtgttccgcatgattgggcacgcgcgatttggtgtgccgggcacctggcgggccggttctgatgccgtacgtcagatcctgcgccagcaggcgggtatcgatctgggcaacaccatcgccgttgatggttccggtttatcgcgtcataacctgatctcgccggccaccatgatgcaggtgttgcaatacattgctcagcatgacgctgagctaaactttattacgatgctgccgcttgccggacacgacggctctcttcagtaccgcgcgggccttcacgctgcgggcgtggatggcaaagtgtcagccaaaacgggttccctgcaaggcgtttacaaccttgccggttttatcacgaccgccagcggacaacgcatggcatttgtgcagtatctttccggctatgccgtcgaaccggctgaccagcgcaatcgccgtattccactggtgcgtttcgaaagcaggctctataaggacatctaccagaataactagcgatgaaactactgatagttgaagacgatctgttattgcaggaagggttagcgctggcgctggggaatgaaggctacgccctggattgtgccaccacggccgctgaagcagatgccctgatccagagcggtgaatacagcctcgtgatcctggatttagggctgccggataaagacggcgcgacgctgctctgccagtggcgtcgtcgcggggttgagaatcccgtcttgattctcaccgcccgcgatgccattgaagacagaattaacgggctggattctggcgctgacgattatctggtaaaacccttcgcccttgccgagctacaggctcgcgtacgggcgttgatccgccgctatcagggccacagcgacaacctgctgacggacggagatatcaccctcaatctgcaaactcagcaggtgctgcgccagtctcagcctgtggaagtgacgccaaaagagttcgctctgctgacgcgcctgatcatgcgcagcgggcagaccgtgcaccgcgaaacgctgcaacaggacatctactcctggcaggacgatccaggatcaaacacgcttgaagttcacattcataatctgcggcgcaagcttggtaaagatcgcatcaaaaccgtacgcggcgtgggttaccgtctggagagccagaaatgaacagtatgcgccggcgattaatggtgttgctggcggttattctgctattttttcaactcattagcgtagtctggctgtggcatgagagccgcgagcaaatcggttttctggtgaatgaaacgctgtccgccaaagcgcgcaacaaccatgtcgaaaaagagatccgcgaagccattgcctccctgctggtcccttctctggtgatggtcggttttaccctgctcttctcattctgggcagtcacctggatcacccgaccactcaacaaacttcgcgccagccttgcgaaccgctcggcggataatctgactcccctaccgatgtattccgatatggaagagataggcgctgtgaccacgtcgctcaatcaactcctcgcccggctggaccacactattcaacaggaacgcctgtttaccgccgatgcggcacacgagttacgtacgccgcttgcggggatcaggctccatctggaactgatggctcagtccggttccccgcaggccacgccactgataagccgtatcgatcagttgatgcacacggtggaacagctgctgatgctggcgcgtgccgggcaggcgatggccagcggccattacgataccgtgaactggacagagacgatcattgctccgctcagcctggagcatgaagccaaagatcatacggtaatatggccggcccacagcgtgctgacggttcagggggacgccgtcctgttacgtctgatgctaaggaaccttctggagaatgccgcccgctacagcccggcaggcacaaccattgaagtggcattaacagcgacggagggcggtacccgggtgagcgttaccgatcaggggccgggtattgatgaggcgcaccgccagtcgatcaccgaacctttccgacgtctcgaccagcgctacggcggcagcggccttgggctgagcatcgtacagcgtatcgtacagctccatcatggccatttaacgctggagaacggcgctgagggcggcctcatcgccagctgttggttaccggcgaaaataggataaaaaaaagccccgttaaggggctttatacaggggttagtgcttgtagatgaactcgacgccttcttcgtcgtcttcatcccagtcatcgtcccagtcttcatcatcttcttccgcttccagctcttcgagctgctggcggtggtagtcatcccacatgaattcgactttttcaggctgtttcgcctcttctgcctgaacaaccggattctcgatgataaaggtcatcacatcccagcagagatctttcacgccaacctggctggcggcagagatcagatagtacttatcttcccaacccatcgcttcggcaatcgctttagctttcgcttcagcttccgctttgtccatcaggtcgatcttgttgaataccagccagcgcggtttttgcgccagtttttcactgtatttctccagctcgccaataatgatacgggcgttttcaaccggatcggaaccgtcgattggatcgatgtcgatgaggtgcaacagtacgcgacaacgctcaaggtgcttcaggaagcgaatacccagaccggcgccttctgctgccccttcaatcagacccgggatgtcagcgaccacaaagctcttctcgttatccatacggacaacgcccaggctcggcaccagcgtcgtaaacggataatccgctactttgggtttcgccgcagagaccgcacggataaacgtcgatttaccggcgtttggcatacccagcatccccacatccgccagcagcatcagttccagttgcaggtcgcgcttatcacccggggtacccatggttttctgacgcggggtacggttaacggaagatttgaaacggctgttacccagaccatgccagccgcctttcgccaccatcaggcgctgaccgtgtttggtcatatcacccatggtttcgcccgtgccctgatcgatgacacgcgtacccaccggcactttgatcgtcacgtctttaccgcgtttaccggtacagtcgcggctctggccgttctggccacgctcggcgcggaaagatttttcgaaacggtagtcgatcagcgtgttgaggttttcatccgcctccagccacacgtcgccaccgtccccaccgtcaccgccgtcaggaccgccacgaggaatatatttttcacggcggaagcttacacaaccgttaccgccatcacctgccacgaccagaatcgtcgcttcatcaacaaacttcattttactctccgtaactcattcgcctgagcgggggactattacaaccgcttcatttttgcgccaacgcccccagagacgatgaccaatggcggaatacatcgcgcccgcaaccacgacaaacgcaccgagataacccaacaggttgagcatcggcttgacgaagacatcgggccaggccattgataacaaatctgaaaataacagcgtaaacagcggggtaagcgtgattaaggcgctcacctgtgctgcctgccagcgcgccatggcttcagccagagcgccataaccgaccagcgtattcagcccacaaaaaatgaggcacgccagttgccagtcgctgagctgggtaattacacccggcttcgctaaaggcaataatgccagtgtacacaaagtgtacagcaaaaagaggatctgctgtgaggcaagacggcgcaataacaccttttgcgcgacgccataactcacccagaccgttgctgcgcccaccccaaaaatgacaccccaggtgtaatccgtcaggcgggtaaaaatctcaatcaggctggtgttaaagaacatcaccagcccgcaaagcagcatgcttgccccgatgatctgcgtgccgcgcatcttctccttgaggatgaatacgctggcgaccatcatgccgaccggtgaaagctgaccaatcacctgcgacgctgtagggctaagatattgcagggaagagctgaacagaatgaagttaccgaacagaccgcccgtcgcgatagccagtaacaccagccaacgcggttttcggaagatgcgcagcggtggcagcttacctttgacggccagaatggcgcccaggcctatgcttgccatcaggaagcgataaaacaccaccgtcggtggctccatgacttccagtacctgcttcattgcaattggcagcgcaccccagcacattgcggtagtgagcgccaaaagaatacccatgccggcctgctgcttcatgcccgttttccctacagaaaattttccgggtttccaatgtaaaaagccccgcaacacgttgcggggctttaatccgttaccggaccgagaaaaccttactcagcaacgatgctgatgtatttacggttgttcgggcctttaacttcaaatttcactttaccgtctgctttagcaaacagagtgtggtcacgaccgcaacctacgttggtacccgcgtggaacttggtgccacgctgacgaacgatgatgctacccgccagaacggattcgccaccgaaacgcttaacgcccaggcgtttagcttctgaatcgcgaccgttacgtgtggagccgccagcctttttatgtgccatttaaatctctcctcaggtcttaggcgctgatgccagtaattttcacatcagtgaaccactgacggtggccctgctgcttacgatagtgtttacgacgacgaaacttaacgattttaactttctcgccacgaccgtgagcaacaacttcagctttgataacgccgccatcaacgaaaggaacgccgattttgacttcttcaccgtttgcgatcatcagaacttcagcgaactcaacagattcgccagttgcgatgtccagcttttccaggcgaacggtctgaccttcgcttactcggtgttgtttaccaccactttggaaaaccgcgtacatataaactccgcttccgcgcacatcctcgtatgattcagagtgcgctataaatattcacaatagggcgcgaatattacgcaaaacgcgagcctttgacaagtgctaccatcaatacatgaagaaaaaaacacaacacgtacggtaacgtttatctgagccgttttttcagtacaatcagcaatactatttataaaccgaaaccctttgtgtacccatctcgtgtgggataaacaggataaaaagcccggcttttgcgatgaatttagaaaaaatcaatgagttaaccgcgcaagatatggcgggtgtgaatgcagcaatcctggagcaactcaactctgacgttcagctgatcaatcagttgggctattacatcgtcagcggcggcggtaaacgtattcgtccgatgattgccattctggccgcacgcgcggttggctatcagggaaatgcccacgtcacgatcgcggcgctgatcgaatttatccacaccgccaccctgcttcacgacgatgttgtggatgaatcagacatgcgtcgtggaaaagccaccgccaacgccgcgtttggtaatgcggcaagcgttctggtaggcgattttatctatacccgcgccttccagatgatgaccagccttggctcgctgaaggtgctggaagtgatgtcagaagccgtgaacgttatcgctgaaggtgaagtcctacagctgatgaacgtcaacgacccggacatcaccgaagaaaactatatgcgggtgatttacagcaagaccgcacgtctgttcgaagccgccgcgcaatgctccggcattctggcaggctgtagcgaagctcaggaaaagggccttcaggactatggccgttacctcggcaccgcgttccagctgattgatgatttgctggactacagcgcggatggcgaaacgctcggtaaaaacgtcggcgatgacctgaacgaaggcaagccaacgctgccgctgctccacgcgatgcgcaatggcacaccagagcaggcgaaaatgatccgggaggctatcgagcagggaaatggacgccatcttctggaaccggtactggaaacaatggctatctgcggctccctggaatggacgcgtcagcgcgctgaagaagaagcggacaaagccatcgccgccattcaggtcattcccgacagcccatggcgtgatgcgctaatcggcctcgcgcacatcgccgtccagcgcgaccgataatcccctcctcatctccctgcgcccacgcagggagattccagtacacaccaataaattacatttccgcgtaagcccatcgggttacaggccgcatgtataaagccgtgccttattctgaatattgcttctcgtaacatgaactttttagaacacatgttcgaagtgagtatagtaatgctgtcttttcacacgaaacgacgtggacgataacgaacacaaggacagcattatggatacaaaattcatcgactggcattctgctgacattattgcggcactgcgtaaaaaaggaacatcgctggctgccgaatcacgtcgtcatgggctaagctcgtcgacgctggcaaacgccctgacccgcccatggccgaagggggaactgattatcgcgacggcgctggatacgcatccgtgggtgatatggccgtcacgctaccacgatcctattacccatgaatttatcgacagaacgcgcatgatgcgccagggcaaaacgaagaaagcacatcaggactgatgcaccaggattgacaggaacagcaatcccccggcctgttatggcaggggggtgccggaacgattactcgcccttcacacgctcgatatttgcacccagcgcgcgcagtttgtcctcaatacgctcgtaaccacgatcgatgtggtagatacgatcgacaacggtagtcccttccgcaatacaacctgccaatacgaggctcgcagacgcgcgcagatcggtcgccatcacctgcgcaccggacagtttttcaacgccgtggcaaattaccgtgttgctttcaatctcagcatgcgcacccatacggatcagttccggtacgtgcatgaaacggttttcgaagatagtttccgtgatgaagcccgtgccttcggccaccaggttcaacagcgtgaactgtgcctgcatatccgtcgggaatgccggatgtggcgcagtacgcacgttaacggctttaggacgctgcccgtgcatatcgaggctgatccagtcttcaccgatttcgatatccgcacccgcatcgtgcagtttcgccagcaccgcatccaaggtatctggctgggcgttacggcagacaatcttaccgccagaaatggccgcggccaccaggaaagtaccggtttcgatacgatctggcagtacgcgatacacaccaccacccagacgttcaacgccttcgatggtgatacggtctgtgccctgcccgctgatcttcgcccccagcgcgaccaggaagttcgcggtatccacgatctccggctcacgggcggcgttttcgatgatggtagtgccttctgccagcgtagcagccgacatgatggtgaccgttgcgcccacgctcactttgtccatgacaatgtgcgcgcctttcagacgaccattgacggacgctttaacgtaaccctcttccagcttgatctccgcgccgagtttttccaggccgaagatatgcaggtcaacgggacgcgcgccgatagcgcatccgcccggcagtgaaacctgtccctgaccgaaacgcgccaccagcggaccaagcgcccagatggaagcacgcatggttttcaccagctcatacggcgctgagaagttgttcacgttgctggcatcgatccagacggaaccgttacgctccactttggtgcccaactggccgagcaacttcatggtcgtgtcgatatcttttagcttcggtacgttctggatctctaccggctcttctgcgagcagcgcagcgaaaagaatgggcagcgcggcgtttttagcgccagaaattgtgacttcgccctggagacgcgtgggtccctgtacacgaaatttatccatcgtttgctctcttataaattcaaccgtgctgcgggcgtttcgccctcagctcaaaaaccgtttagtttgcgatcgcgtgcccactcctgtggggtaaacgctttaatcgacagggcgtggatgcggttatccgcaatgtattccatcagcggcgcgtacacagcctgctgtttcttcacgcgactcattccgtcgaacatctcacccacagcaataacctggaagtgactgccatcgccagagacgtgggcttcctgaagggagagtgcattcatcagcacagtctggatttcattattttccatggggtctacatcatctgatagtgaaaacaagctcaacatcttagagcaaagtggcgcggtcttaaacaagcaaaaagccccgacgcgtaaactgtcggggctttcagaagtaacgtactgaaaaaattagcgaggtaatacgtcttcgggcaaattgtaaagctgtgcaagggtaatcacgttatcgcttacccccgtcagggtaacgctgctcccctgctttttgcccgtggccaccaggtgcgccagcagggcgataccggcggtatctacccgcgtaacgccatggagatcaatcagcgtcacgccctgcatcgcgttatggcgagcgtcccacagcgggttaagcagatcctgatccagctctcccgtcagcgtcaacgtctcgccgtcacgcgcccagctaagctgctgtgacattacttcttctcgtccagggtaattttctgacgagaaatggactgaagctgagccgtcaggccatcgatgcctttagtgcgcagcagatcgctccactcgttctgtttagtggtgatcatgctgacgccttcagcgatcatgtcgtacgcctgccagtttccggtctggctgtttttacgccactggaagtccagacgaaccggtggacgaccgtttggatcgataatcgtcacgcgaataggaatgatagtggcatcgcccagcggctgttcaggggcaatctgataggtctgcccgtggtacatcgccagcgcctggccgtaagcctgtttcaggtattcacggaacgccgcaaagtaagcctcgcgctgtgcaggggtcgcatctttgtagtaacggcccagcaccagtgcgcccgcatacttgatctgcacatacggcagcagttcctgatccaccacatcacgcagataatcagggttagaacggatttttggctgttcgtttttaagacggtcgaaggttttcttcgcggcctcatccatcagtttgtacgggttactctgatccgcagcgtgcgccgcggtaagaggggcaatgaccagcatggcaaccattaacagtcgtttaaacatgaatgacttctcctgaaattaattcgtcgcgcctggcgtcggttcgacgttggtgtggtcttcactctgcgcaggggcatcgtcagactttttatcatcccctttactgttgtaaaggaactgaccaatcatatcttccagcaccatcgctgacttggtatcctggattacgctaccgtctttaaggatagtcgttcccagctcaggatcttcaaaaccaacgttaagggccagatattgctcccccagcaggccagaggtgcggatagaaagcgagctggtgtccggaatgtggttatagcgctcttcgatatccatcgcgacgcgcggcagataggttttctcatcaagcgtaatgtcagcgacacgtccgataacgacgccaccaatacgcaccggtgagcgcgctttcaggccgccgatgttatcgaaagtcgcgtagacacgatacgtcggctcggcgcgaacagaggtgatgtccgccgctcgcaggcagatgaacagcgcggccagcagcgccagaagcagaaacacgccaacccaaatttcattttttctcgtttgcatgaactcaattcccaaacatcagtgcggtgagcacaaaatccagacctaaaacggccagcgacgaatgtacgacagtacgcgtcgttgcacggctaatgcccgccgacgtcggaatggcatcgtaaccattaaacaacgcaatccaggtaaccgtcacagcgaaaaccacgctcttgatcagacagttcaccagatccatccgcagatcgatggcgtcctgcatggcagaccagaagaatccggcatcaatgcctttccagttaacgccaaccagcgcgcctccccagatacctaccgccacaaagaggatagtcagtaacggcaaggagataaccccggcccagaagcgcggcgagattacccggcgcagcggatcgactgccatcatctccatactggagagctgctcggtggcgcgcatcaggccaatttccgccgtcaacgctgacccggcacgcccggcgaacagcagcgcggcaaccaccggcccgagttcacgcagcagcgagagcgccaccagcatgccaaggctggtttccgcgctgtaggttgtcagcaccagatacccctgcaaccccagcaccatgccaataaacagacccgacacgatgatgataagcatcgacagcacgccgacgttataaagctgccgcaccagtaacggcgcatgcttgcggaactccggtttgccgaccagcgcgttgaacaacattaatccggcacgcccgaacgtactgatggtttttaggccacggtgtccaagacccgccaacgcatttaacagcatgagtggcttaactccctattcccagtaaatcgtcatgatagtcgcccgccggatagcggaaaggcaccggcccatctgcgataccgtccaggaactgccgcacgcgcggatcgccattctcctgcaacgcctgcgcgctgccgtgggcgacgatcttcttgtcagccacaatataggcgtaatcagcgatactcagcacttccggcacgtcgtgggaaaccaccacgcaggtgacgccaagggcgctgttcagctccgaaattaacttcaccagcacgcccatggtgatagggtcctgcccgacgaacggttcatcgaacatgattaaatcgggttccagggcaatagcacgcgccagcgcggcgcgacgcgccatcccacccgagagttcggacggcatgagtttcgcagccccccgcagccccacggcttcaagcttcatcatcaccgtgctgtgcaacagctcaggaggaagatgggtgtgctcacgcaacggataggccacgttgtcaaaaacgttcatatccgtgaacagcgcgcccgactgaaagagcatgctcatacgtttgcgaaccgtgtagaggcgcgagcgagacatctccgggacattttcgccgtcgaagagaatttcgccgctgtcaggggggatttgcccgccgataaggcgcagcaacgtggttttaccgatccctgacggccccatgatggcggtgattttaccgcgcggcacggtcagcgaaatatcatcaaatattaaccggttgccgcgagaaaaactgacgccccggacatcgactatattcgccatcgtttggctcatttatggttccttacttaccttgcttcacggctggcatgaagcgtaaatcagccctaaaccccgcatttttacagaatattcactattggggttagcgaaagctggcatttgttttacttttccggcgcataaagtcaaaattaggaattcgttacgtctcagacttcatctggcgccaacattcgtgcgcagtggaccagcgagtatacctgaagaaaggacttttgatgcttttagcaacagcactgttaataattggtttactgttggtggtctacagtgctgaccgtttggtctttgccgcatccattctctgtcgactcattggcatgccgcccatcattatcggcatgacggtggtcagtgtaggcacatcgcttcctgaaatcatcgtttctgtttcagcctcgctgcatgggcaggtcgacctcgctatcggcaccgcgattggctctaacatcgtcaatatcttactgattttaggcttagccgcattattgcatccatttcgcgtgcattctgatgttttgcgccgggaattgccgttaatgttagtcgtcagtctgctggcaggctacgtactttatgacggggtgctgagcgtcgatgacggtatattcctgctcgccctggccgtgatctggttgctttacagcgtgaagatcgcacgtctggcggaaaaacagggcaacgatagcctcacgcgtgagcatctcgccgagctgccccgggaagggaccttacccgtcgccctgctgtggctgggcgtcgcgctgatcatcatgccaatggccacgcggatggtggtcgataacgcgacggtgctggcgaacgcgtttgcgatgagcgaactgacaatcggtctgacggtaatcgccatcggcaccagcctgccagagttggctaccgccatcgccggggcgcgtaaaggggaagatgatatcgccatcggcaatatcattggctcgaatattttcaatatcgcaatcgtgacggggctgccggcgttaatctcgccggggccgtttaaccctatggttttcacgcgcgattacggtgtaatgctgctggtcagcgtgattttcgccctgctctgctggcggcgaaaagagcagatcggcaaaggcgcaggcgcgctgctgacgggtggatttatcgtatggctggcgatgctgtactggctttcgcctcttctctctgggtaaacggaaacgcattatgtcgcaaatagaattgcagccgggttttgactttcagaaagcaggcaaagacgttctggagattgaacgtgaaggtctggcgcagttagatcagtacattaatcaggattttagtctggcctgtgagaagatgttctactgtgccggcaaagtcgtggtgatggggatgggcaaatccggccatatcggacgcaaaatggcggcgacctttgccagtaccggcacgtcgtcattcttcgttcatcccggtgaagccgcgcacggtgacctcggcatggttacgccgcaggacgtggttatcgcgctgtccaactccggggaatcgaatgaaatcctggcgttgatcccggtgctgaagcgtctgcacgtaccgctgatttgcatgaccagccgcccggaaagcagtatggcgcgtgcggcggatattcacctgtgcgtgaaggtgcctaaagaagcctgtccgctggggctggcgccgacctccagcacaaccgccgcgctggtgatgggcgatgcccttgccgttgcgctgctggaagcccgcggttttacgcctgaagatttcgccctgtctcaccccggcggcgcgctcgggcgcaaactgctgctgcgggttaacgatattatgcacaccggggatgagatcccgcacgtcagcaaagaggcctctttgcgcgacgcgttactggagatcacccgtaaaaacctgggcatgacggttatctgcgacgatctgatgaagattcagggcattttcaccgacggcgacctgcgccgggtattcgatatgggtgtggatgtccgaacgctgggcatcgctgatgtgatgacgccaggcgggatccgcgtccgtccgggcacgctggcggtcgatgtgctgaacctgatgcagtcccgtcatattacctcagtgatggttgccgatggcgaccaactgctgggtgtggtacatatgcatgatctgctgcgcgctggcgtagtgtaatgaaggataaaacaatgagtaatgcgggtgcatcccttgcaacctgttatggcccggtgagcgcccagatgatggcaaaggcggaaaatatccgcctgctgatcctcgatgtggatggtgtgctctccgacggtctgatttatatgggcaataacggcgaagagctgaaagcctttaacgttcgcgacggttacggtatccgctgtgcgctcacgtccggtattgaagttgctatcatcaccgggcggaaagctaaactggtagaagatcggtgtgaaacgctgggcattacccatctctatcaggggcagtctgataagatggtagccttccgggatctgctgggaaaactggccattgcaccagagaatgtggcatacgtcggggatgatttgatcgactggccagtgatggcggaggtgggtctgagcatcgcggtggctgacgcgcacccgctgctgatcccgcgtgctgattacgttacccatattcacggtggccgcggcgccgtccgtgaagtttgcgatctgcttctgctggcgcagggcaagcttgatgaggcgaaagggcaatcgatatgagtaaaaccagacgttgggttatcattctgcttgcgcttgtcgccctggtactgattggcgtcaacctcgctgaccgcgatgatacgcaagcggaagtggttaacacgagcgacccgacttataaaagcgatcacagcgacaccgtggtctatagcccggaaggcgcgctgaactatcgcctcgttgctcagcatgtagaatatttttcagatgacggtacctcgtggtttacccaaccggtcatgaccacctttgatacggacaaagtgccgacgtggtctatcaagtctgaccgggcaaaactgacaaatgaccgtatgctttacctgtatggtcacgttgaagtcaacgccctgaccgctgacgcgcaactgcgaaaaattacgacggataacgcccagatcaacctggtcacccaggatgtcacgtcgcaggatctcgtcaccctgtatggcacaacatttaattccagcggtttaagaatgcgcgggaacttacgcagcaaaaacgccgagctgattgaaaaggttagaacctcctatgaaattcaaaacaaacaaactcagccttaaagttgttatcgccagcgcgctgctggcggccagtcttcccgcgcttgctgtgactggcgacaccgaacagccgattcatattgaatccgatacccagtctctggatatgcagggtaatgtcgtcacctttaccggcaacgtcgtcatgacccagggcaccatcaaaatcaacgccgacaaagtggtcgttacccgtccgggcggcgagcagggcaaagagattatcgatggttatggcaacccggctaccttctaccagatgcaggacaacggcaagccggtgaaaggccatgcctcgcatatgcactatgaactggcgaaggatctggtcatcctgaccggtaatgcttacctggaacagctggacagcaatatcaaaggcgacaagatcacctatctggtgaaagagcagaaaatgcaggcctccagcgaaaaaggcaaacgcgtcacgaccgtgcttgtgccttcgcagttgcaggacaagaacaacggtcaggctccggcaaagaaaaagagtaactaattcgttatggcaactttaactgcaaaaaacctcgcgaaagcgtataagggccgccgcgtcgtcgaagatgtcagtctgaccgtcaactccggcgaaatcgtgggtttgcttggccctaacggggcgggtaaaaccacgaccttctacatggtggtgggcatcgtcccgcgtgacgccggcaacatcatcatcgatgatgaagatatcagcctgctgccgctgcatgcccgcgcgcgtcgtggcatcggctatctgccgcaggaagcctccatcttccgccgcttaagcgtgttcgacaacctgatggccgtgctccagatccgtgacgatctgaccagcgagcagcgcactgaccgtgcgaacgagctgatggaagagtttcatatcgaacatctgcgtgacagcctcggtcaggcgctgtccggtggtgaacgccgccgcgttgagattgcgcgcgcgctggcagcaaacccaaaattcatcctgctggatgaaccgtttgcgggcgttgaccccatctccgttatcgatatcaaacgtattattgagcacctgcgcgatagcgggcttggcgtactgatcacggaccacaacgttcgtgaaacgctggccgtgtgtgagcgcgcctacatagtgagccagggccatctgattgcccacggtacgccgcagcaaatcctcgaagatgagcatgttaagcgcgtgtaccttggggaagacttcagactctgatagggtagaggttaagtcacgccgaaccggagaaaaacgctctgaacatgaagcaaggtttgcaattacggctcagccagcaactggccatgacgccgcagctacagcaggcaatccgtctgttgcagctgtccacgttagaactccagcaggaactccagcaggcgctggacagcaatccgctgctggagcaaaccgatcttcatgacgaggtagacgcccagcagacgcaggacacagaaacgctcgactccgtagatgcgctcgaacagaaagagatgccggacgaactgccgctggatgccagctgggatgaaatctacaccgcgggtaccccttccgggacacgtgcagactaccaggacgatgaactcccggtctaccagggcgaaaccactcagtcgcttcaggactacctgatgtggcaggtagagctgacccctttctcggataccgatcgcgccattgccacctcgattgtcgatgccgttgacgacacgggctatttgaccgtgacgctggacgagattctggaaagcatcggcgatgacgagattgaactggaagagatcgaagccgtcctgaaacgcgttcagcgtttcgacccgattggcgtcgccgcgaaagatctgcgcgactgccttctgatccagctttcgcagtttgccaaagagacaccgtggattgacgaagcccggctcatcatcagcgatcatctggatctgctggcgaatcacgacttccgcaccctgatgcgcgtcacgcgcctgaaagaagaggtgctgaaggaagcggtgaatctgatccagtccctcgatccgcgtccggggcagtcgatccagaccagcgaaccggaatatgtcattcctgatgtgctggtgagaaaacacaatggccggtgggtcgttgaactgaacgccgacagcattcctcgcctgcaaatcaaccagcaatacgcctccatgtgcaccagcgcacgtaacgacgctgataatcaatacattcgcagcaaccttcaggaagcacgctggttgatcaagagtctggagagtcgtaatgatacgctgctgcgcgtcagccgctgtattgtcgaacagcagcaggcgttctttgaacagggcgaagagtttatgaaaccgatggtgctggcggacatcgcccaggccgtcgagatgcatgaatcaaccatttcccgcgtgaccacgcagaagtatctgcacagcccacgcggtatttttgagcttaagtatttcttctccagccacgtgaacaccgaaggcggcggcgaagcctcgtcaacggccattcgcgcactggtgaagaagttgatcgccgcggagaaccccgcgaagccactcagtgacagtaagttaaccaccatgctgtccgatcagggtattatggtggcacgtcgtactgtcgcgaagtatcgagagtctttatccattccgccgtctaaccagcgtaaacaactggtttgacacaaccgataaggaagacactatgcagctcaatatcaccggacataacgtcgagattactgaggctttacgcgattttgtaaacactaagtttgcgaaactcgagcagtatttcgagaggatcaaccaggtctatgttgtgttgaaagtggagaaagtgacgcatatctcggatgcgaccctgcacgtcaacggaggggaactccatgccagtgcggaagggcaagacatgtacgcggctatcgacggcttgattgataagcttgcgagacagctcaataaacataaagataaactgaaacaacactaattgtccgggcagttaacgggtgcaggacggcctgttgtgaaacacaacaggccatttgtacagttagcgcttaggtgaaattatgataaacaacgattccgctcttcaactgagcaatgtccttaaccaggattgtacccgcagtggcgttcactgccagagcaaaaaacgtgcgctggaaatcatcagtgagctggccgcaaaacagctgggtctgccgccgcagatcgtgtttgaagccattctgacccgtgaaaaaatgggcagtaccggcatcggcaatggcattgcgatcccgcatggcaagctggaagaagatacgctgcgtgccgtgggggtgtttgtgcaactggaaacgcctatcgcttttgacgccatcgataaccagcctgtggatctgcttttcgcgctgctggttcctgccgatcagaccaaaacccacctgcacacgctgtcgctggttgccaaacgtctggcggataaaaccatttgtcgtcgactgcgctcagcccaaagtgatgaagagctttatcaaattatcactgaagcagaaggcaatcaggatgaggcataatcgggaaagggccttcagaacggctgccctgaggagaaacggaacatggtgctgatgatcgtcagcggtcgttcggggtccgggaagtccgtggccctgcgcgcgctggaagacatgggattttactgtgtagataacctgccggtagtgttgttacccgatctggcgcggacgctggcggacaggcaaatctctgccgccgtcagtatcgacgtgcgtaacatgccggaatcgccggaaatcttcgagcaggcaatgaacagcctgccggaatgcttctcgcctcagctcttgttcctggacgctgaccgcaacacgctgatccgtcgctacagcgatacacgtcgtttgcatccgctctccagtaaaaatctttcgctggaaagcgccatcgataaagagagcgatctgcttgagccgctgcgttcccgggccgacctgattgtcgacacctccgaaatgtccgtccacgagctggcggaaatgctgcgtacgcgcttactcggcaagcgcgagcgcgaactgacgatggtgtttgaatccttcggctttaagcacggcatacctatcgatgcggattacgtttttgatgtgcgtttcctgccgaacccacactgggatccgaaactgcgtccgatgaccggtctggataagccggtggcggcgttcctcgacagacacacagaagtacacaattttatctaccagacgcgaagctaccttgagctatggttacctatgctggaaacaaacaatcgcagctacctgacggtggcgattggctgtaccggcggtaaacatcgttcggtctacattgccgaacagctggccgattacttccgctcacgcgggaagaacgttcagtcccgccatcgcacgctggaaaaacgcaaaacatgaccgtaaaacagaccgtcgaaatcaccaacaagctgggcatgcatgcgcgcccggcgatgaagctgtttgaactgatgcagggttttgatgctgaggtgctgctgcgcaacgacgagggaaccgaggcagaagccaacagcgtgattgcgctactgatgctggattctgccaaaggccgtcagattgaagttgaagccaccggcccgcaggaagaagaagcgctggcggcagtgattgccctgttcaacgccgggtttgacgaagactaacgttcgccatgtcggcgggtagcgctgcgcttacccgccctacctaagattatttcgctccataaacccttccccacccagctgacgcatctggcgcataatccacgcctggcggcttcgcacgtagcctgacggggcgctggccttaaaacgcagcgggttcggcagcacggcggcaagcagtgccgcttcggacatagtcagcctgctggcgggcttgccaaaatagcgctgcgatgccgcttcgacaccaaatacgccgtcaccaaattccgcgatattcaggtagacggttaaaatgcgttttttgctccacaccgtctcgacccccagcgtcagcccggcctccagcccttttctcacccagctgcgaccgtcccataagaacaggttttttaccgtctgctgagaaagcgttgacgcgccgcggacgcggttttcatgacgttcattatgatccagcgccttctcgatagccgccacgtcaaaaccccagtgctccgggaatttctgatcttctgccgcaatgaccgccagccccatccacggggagatggcatccatgctgacccagtcagaatgggcaacatagccaaaatccccagagagccaggcgctaatctgccgctctgccatcacggccgagaacgggacgggcaggatgctgaacagcgcaataccgccgccccagaacacagccaggaccagcacaatacgcagcaggatccgttttaaccacccgccgggggagaatttacgactcattcggtcaggaccagcactctgtccaccagcttttcaatgcctgcggcagcctcggcgatgttctgcgccagcatatacgctggcgtggtgatgatcttgttgtcctcgtccaccacaatgtcgtctaccggacatggcacgtgttcaccgcccatatcctcgacaatctcagcggtatcaatgtcggttccgatcgtgagccgcagcgggaaatcaaaaattttcggcagcatggccggcgcaatgcagataaagccctgcggcttacctgccgcatgcatcgccagcgatagcgctttcaaatcgggatcgacatgacacgccgtgccttccgttgcaaacgtgctcaggtttttcgccgcgccaaaaccgcccggcacgatgagcgcatcaagctcagcggcatcggcctgtgccagcgggtgaatatcgccgcgcacaatacgcgccgcttcaatcagcacgttacggctttccgccattggctcgccggtgagatgattaatcacgtctgcctgggttttatccggggcgaagcagataacgtctgccccctggcgcgataatgccagcagcgttaatacggtttcatgtatctctgaaccatcgtaaacaccacatccgctcagcacgacaccaatctttttcattctgacgatccttctatgcaactcgctgaagcacattaaaaattctgattaaaacgctatgcttcacacatttcactgattcatgtaacaaactgtttaagatttgctatcttatctgcgtgcggcctcaattttcaggcggcgtccatgcgaaaacaacccataaaaatcaggcgcagccacgatttccctggtgttggcgcagtattcgcgcaccccggtatagccggggtcatttttttctggcatccacccaggctttcagcactgccacatcgttttgccactcttgtttcatctcttcgacccaatcacctacgttatcttcccaggcaggtaaatcaggagactgaatctgttggcccagctgctggagatggcgtaacccgacagatcctgccgcgcctttgattttatgcccctcttcgacgatgcccttctggtcacgcgccgtcaggttggattcgagcacgttcagatagcccggcatcattttttcgaacacggcgaggccatcggtgatcagttttggtcccaccagatcgatatactgctccagcatggcggtatccagtatcgtttgggctttagcgctatcaacagacgtcatggtgctctcctcttcatcacaggtatcccagaacttcttgatcatcgccgtcagggcgggtaccgccagcggcttgctgagcacatcgtccataccggcctcgagatactcttttttatctttcaacacgtttgcggtcaacgccaccagcggcggcagctcgtcaggagcatatttgcgcgtcagctcgcgggagatatccagcccggtcatgtccggtagctgaatatcgagcagcaccaggtcatactcgcccggcgtgaacatctccagcgcggctttcccggtcatcgccacatccacgctgttaccgagtttttccagtaccgaccgagcgacaatgacgttcagctcaatatcttccaccagcagaacgtgcagggctggcagcggcatatcgtcgttctcaaacgtatcttccacctcttccgccacggcaggcgcgtggacggtaagcgtaaaggtggagcctttacccggctggctggcaacggtgatatccccgcccatacttttcgccagacgtttcgacaccgccagtccaatgcccgtaccggtcgccggtttaccgccgtggctgtctttaacctgataatacatggcgaagatcttatcctgttcctcttgaggaatgccgatacccgagtcctcaacttcaaagtgcagcatgtcgccttcgtcatagcgaatgcgcaccgcaacctgccccttctgggtaaacttcacggcgttgctgatgaggttccacaggatctgccgcagacgtgtgccgtccgtcaccactttatgcggcaacggcagcgttggctccatcacaaagctcaaccctttttgctgagcctgtaaacctgacaggttttccaggtcagcgaggaaaccggtaaaatcaaccggctggttgtcgagctgaactttacggcgttccatcttatccatgtcgataatatcattgaagatattgcccagcgtgaccgccgagacgtggatcgttttcaggtatttttcctgctcgctggtcagctcggtatccagcagaatgcggctcagccccacaatgccattcagcggggtgcgcagttcatggctgatggtggagatgaaggtggttttatcccggctggcgcgctccagcgcatcctgatagcgcttacgctcggtgatatcgcggccaaagcccatcagaccatgacgtttccccacccggtcgtaataaggcactttgcggatctcaaagcaggctttgcgcccgtcaggatagtccagccactgctcataggtcagcgaaacgttatggcggaagaccttttcatccgtctccatcacttttgctgccgcctcttcggaatagacatcctgaggtttcaggtggatcagctgcttttcgcttttcccggtcaacagttccatggcccggttacagccggagaactctttatcttcattacggtagaacaccagatccggcgacgcatcgaggaacgagcgcaggaaagaggattgctgttcaagctggatctgcgtcacttcacgctctttcatctcaacttttagctgctcaagcgtggtctgacgctcggcttccgccttctcacggtctgaaatttcctgattcagctgggcaatgttgtccttgagctggacgttgagtttgagatcgcgctcgcgcatctcttccagcttatccaccagtttcgataaacgctgtcgggactcttccagttgctcaaccaccacggagagaaaatagaccgcccatggggtaatcagcaggccaaagaaaatagagcggatcacgtcgatgctctcgacctgaccatgcagaaccatggtcacggccatttgcacgacgatggccagaacgaccagcgccagcgccagcagcatggaaaaacgcaccagcccgagcttcatcatcaggtcgacgtagtactgggccagcattcgaatttgcttcatagaggatcccttcacgactttatcgctcaataatactcaaattcacggcgaggcgttgaaggttgtgagaaaaagtgcggagtgaaacaggagattagcctcgcccccgggcaaccgggagcgaggaagaaggtttatcaggagcgttttagcagcatccagaggctgatcaggaagaaactggcgctcggcaacagtgctccgataattggcggaatgccatacaccagcgtcagcggaccgaaaatctgatcgaggacgtagaacacaaaaccaaagctgataccggttaccacgcgaacccccatcggcacgctacgcagcggtccaaagatgaacgatagcgccatcagcatcatcacggccacggacagcggctggaagattttgctccacatgttgagctggtaacgccccgcatcctgtccgctcgatttcagatacttcacgtaattatgcagaccgctgatggagagcgcatcgggatcgagcgcaaccaccccaagcttgtccggcgtcaggttggttttccaggtaccgctaacggtctgcgaaccggtgatctgtttcgggttcgtcaggtcagattcatcaacctgggataaccgccacagcttgttgttcgcatcaaatttagcggaggcggcataacgcaccgactgtaaacgacgatcgttattgaaggcatagatactcacgccgcccagttcatcgtcccctttcacgcgttcgatatagacaaagttctgaccatctttcgcccataatccctgctgcgtggagagcagtgaaccgccgtacatagcctgagcacggtagttacgcgccatctgttcgccctgtggcgcgacccattcgccaatcgccatggtcaacagcaccagcgggatcgcggttttcatcaccgacagcgcaacctgcatacgggtaaaacccgatgcctgcatcaccaccagctcgctacgctgagccagcatccccaggcccagcagcgcccccaacagggccgccatcgggaagaagatctgcacatcttttggtacgctgagcagggtatacatcccggcgcccaacgcgtcgtaactcccctgcccggcttttttcagctggtcgacaaatttgataatgcccgagagcgacaccagcatgaacagggtcatcatgatggtggtgaaaatcgttttaccgatatagcggtcaagtacgccaaacgcctgcattagatggctcctttacgcgtaaaccgggcacgaagacgacgcacaggcaccgtgtcccacaagttgagtccgactgccagcagcagatacaaaccattcacgacccaggtccagatcatcgggtcaatttttcctttcccgccgttagacttgattgaggtttgcagcaggaagaacaccagatacagcagcatcgctggcagcatcgacagcacgcggccctggcgcgggtttaccacgctcagcggaaccaccatcagcgccatcataaatacggtgaagaccagcgtgatacgccagtgcagttcagcacgcgcacgatcggtatcggtattcattaaggtgcgcatatccatctgctcagtatccgtgggatcgagcgcgacggcctgatggccaatgatggcctggtagttctgaaaatcggtaatacggaagtcgcgcagcatagccgtgccttcgaaacgcgttcctttgttcagcgtgacaacctgagagccgtctttacgctgagacagctgaccggagtccgccaccaccacagaaggccgggcgttacctttcgggcgcagttgagcaagaaacacgtcattgaagcggttgccatcgacgctttcgataaacagcacggagttaccgtcggtcgcctgctggaactgcccctgcgccagcgccgccagccccgggttagcttttgcttccgccagcacctcatcctgatgacgagaggaggtcggccccgcccacatgacgttaaccgcggcaacaatgcccgtaaacagcgccagcaccatggctgcttttaccagtacggctttactgaggccgcaggcatgcatcacggtgatttcactttcggtatagagcttacccagggtcatcagcagaccaaggaacaggcttaacggcaggataagctgcgccatttccggcacgccaagcccgagcagggaaagcaccagattcgttgggatttcgccatcaaccgccgcgccgaggatcctgaccagcttctgacagaaaaagatcagaaggaggataaagaggatcgccagttggctcttcagcgtctcccgaaccagatatcttatgattatcactttaaatacgcccgttaaaactcgtcttatgcaggaatttagcttgtttcatggcttaaacgtcatttattctcttgagtcgtcgaaatcatcgctaagattaaaaaacccggcggattcgcgcttcatgacatttattgacgtgtcgaaaccgtagtaacgtaagattaacacgaagtcaccacaacggcggacatgagttacgaaaggtttcaattctatccgtagccgccgccgttgtctttaagattcaggagcgtagtgcatggagttcagtgtaaaaagcggtagcccggagaaacagcggagtgcctgcatcgttgtgggcgtctttgaaccacgccgactctccccgatcgccgagcaactcgataaaatcagcgacggttatatcagcgccctgctgcgccgtggcgaactggaaggcaaaccagggcagaccttgttgctgcaccatgttccgaacgtcctgtccgagcgtattctgctgattggctgtggtaaagaacgtgagcttgatgagcgccagtacaagcaggttattcagaaaaccattaatacactgaatgatactggttcgatggaagccgtctgcttcctgacggagctgcacgttaagggccgcaacacgtactggaaagtgcgtcaggccgtcgaaaccgcaaaagagagcctctacagctttgatcagctgaagaccaccaaaagcgagccgcgtcgcccgctgcgtaaaatggtctttaacgtgccaacccgtcgcgagctgaccagcggcgagcgcgctattcagcacggtctggccattgccgccggtattaaagcggcaaaagatcttggcaatatgccgccaaacatctgtaacgccgcgtacctggcgtctcaggcgcgccagctggctgacgcctacagcaagaacgtcatcacccgcgttatcggcgaacagcagatgaaagagctggggatgcactcttatctggcggtcggtaacggttcccagaacgaatccctgatgtcggtcattgagtacaagggcaatccgtcagaagatgcgcgacccatcgtgctcgtcggtaaagggctgaccttcgactccggcggtatttccatcaagccttcagaaggcatggatgagatgaaatacgacatgtgcggcgcggcggcggtttacggcgtcatgcgcatggtcgcggaacttcagttgcccatcaacgtgatcggcgtgctggcgggctgcgaaaacatgcctggcggccgcgcttatcgtccgggtgatgtgctgaccaccatgtccggccagaccgttgaggtgctgaacaccgacgccgaaggccgtctggtgctgtgtgacgtgctgacctacgttgagcgtttcgaacctgaagcggttatcgacgtggctaccctgaccggcgcctgcgtgatcgcgctgggccatcacatcaccggcctgatgtcgaaccacaacccgctggcgcatgagctgatcggcgcgtccgaacaggccggcgaccgcgcgtggcgtctgccgctgggggacgagttccaggaacagctggagtctaatttcgcagacatggcgaacatcggcggtcgtcctggcggagcaatcaccgcaggctgcttcctggcgcgtttcacccgcaagtacaactgggcgcacctggacatcgcggggaccgcatggcgctccggtaaagccaaaggcgcgaccggacgtccggtggcgctgctgtcgcagttcctgctcaatcgtgcgggttttaacggcgacgagtgatgtaaaacgccgggtggcggctacgccttacccggcctacacgccactcaaccgtaggccgggtaagcgaagcgccacccggctttgcatttaaatccacgacaagaagccccatatatgaagaatgcaacgttctaccttctggacaatgacacccatcaggatggcctcagcgccgttgaacagctggtgtgtgaaattgccgcagaacgttggcgcgcaggtaaacgcgtcctgattgcctgtgaagatgagcagcaggcgattcgcctggatgaagcgctatgggcgcgcccgccggagagttttgttccgcataacctgtcgggcgaaggtccacgcggcggggcaccggtggagattgcctggccgcaaaaacgcaacagcagcgcgcgcgacattctcattagcctgcggacagactttgcagattttgccaccgctttcacagaagtggtagactttgtcccttacgaagaatccttgaaacaactggcgcgcgaacgctacaaagcgtaccgcctggccggttttaacctgaatacggcaacctggaaataatggaaaagacatataacccacgcgatatcgaacagccgctttacgagcactgggaacagcagggctatttcaagcctaacggcgacgaaagcaaagagtccttctgcatcatgatcccgccgccgaacgtcaccggcagtttgcatatggggcatgctttccagcagaccatcatggataccatgatccgctaccagcgcatgcagggcaaaaacaccctgtggcaggcggggactgaccacgcgggtatcgcgacccagatggtggttgagcgtaaaattgccgctgaagagggtaaaacccgccacgactacggtcgcgacgcgttcatcgacaaaatctggcagtggaaagcggaatccggcggcaccattacccgtcagatgcgccgtctcggcaactccgtagactgggagcgcgagcgcttcaccatggacgaaggcctgtccaacgccgtgaaagaagtctttgtgcgcctgtacaaagaagacctgatttatcgtggcaagcgcctggtcaactgggacccgaaactgcgcacagccatctctgacctggaagtggaaaaccgcgagtctaaaggctccatgtggcacatccgctatccgctggccgacggcgcaaaaaccgccgacggtaaagattacctggtggtggcgaccacccgtccggaaaccctgctgggcgataccggcgtggccgttaacccggaagatccgcgttataaagatctgatcggcaaattcgtggtgctgccgctggtgaaccgccgtattccgattgtgggcgacgaacacgccgacatggaaaaaggcaccggctgcgtgaaaatcaccccggcgcatgacttcaacgactatgaagtcggtcgtcgtcatcaacttccgatgatcaacattctgaccttcgacggcgatatccgcgaaagcgcagaagtgtatgacaccaaaggcaacgaatccgacgtttattccagcgacatcccggctgagttccagaagctggagcgctttgccgcgcgtaaagccatcgtagccgccgttgacgcactcggcctgctggaagaggttaaacctcacgatctgaccgtgccgtacggcgaccgtggcggcgtggttatcgagccaatgctgaccgaccagtggtacgtgcgtgccgacgtgctggcgaaaccggctgtggaagcggttgagaacggcagcattcagttcgtgccgaagcagtacgaaaacatgtacttctcctggatgcgcgatattcaggactggtgtatttcccgtcagctgtggtggggtcaccgtatcccggcatggtacgacaacgaaggcaatgtctacgttggccgcaccgaagaggaagtgcgtcaggaaaacaacctgggcgcggatgttgccctgcgccaggacgaagacgtgctggatacctggttctcctccgcgctgtggaccttctccaccctcggctggccggaaaacaccgacgcgctgcgtcagttccacccaaccagcgtgatggtctccggcttcgacattatcttcttctggattgcccgcatgatcatgatgaccatgcacttcatcaaagacgaagacggcaagccgcaggttccgttccataccgtctacatgaccggcctgatccgcgacgacgaaggccagaagatgtccaaatccaagggtaacgttatcgacccgctggatatggtggacggtatctctctggaagagctgctggaaaaacgtaccggcaacatgatgcagccgcagctggcggagaaaatccgcaagcgtaccgagaagcagttcccgaacgggatcgaatctcacggtaccgacgccctgcgcttcaccctggcggcgctggcctccaccggtcgtgacatcaactgggatatgaagcgtctggaaggttaccgtaacttctgtaacaagctgtggaacgccagccgcttcgtgctgatgaacaccgaagatcaggattgcggctttaacggcggcgaaatgaccctgtctctggcagaccgctggatcctggcggaatttaaccagacggtgaaagcgttccgcgacgcgctggacagctaccgcttcgacatcgcggcaggcatcctgtacgaattcacctggaaccagttctgtgactggtatctggagctggcgaagccggtcatgaacggcggttctgaagcggaactgcgcggcacgcgtaatacgctgattaccgttctggaaggtctgctgcgccttgcgcacccgatcattccattcatcaccgaaaccatctggcagcgcgtgaaggtgattgccggtattaatgccgataccatcatgctccagccgttcccggcattcgacgccgcgaaagtggatgaagccgcatctgcggataccgagtggctgaaacaggcgatcgttgcggtacgtaacatccgcgcggaaatgaacatcgctccgggtaaaccactggagctgctgctgcgcggttgcagcgaagctgccgttcgtcgcgtcaccgagaacaacaccttcctgaaaaccatggcgcgtctggaaagcatcaccgtgctgcctgccgatgacaaaggtccggtttccgtgaccaaaatcatcgacggcgcggagctgctgatcccgatggcgggcctgatcgacaaagatgcggagctggcgcgtctggcgaaagaagtggcgaaagtcgacgtggaaattggcaaaatcgaaagcaaactggcgaacgagggctttgtggcccgcgcgccggaagcggtcatcgccaaagagcgtgagcgtctggttgccttcgccgatgcgaagaccaaactgatcgagcagcaggcggttatcgcggcgctgtaatgcttttaccccttacgcttcagggcgtaaggggtatccttcctgaaaactcctcgcttgcactcccctttctgcggtgctattaacagcagttgtgtgtcaatttttgtcatgagtaatgctatgagcgtgattacccccgtcgcgacgacaatgcgtcggatcactgagcaggacaacccggctatcgccgccgttatccgcacggtttctgccgaatatggcctgaccgccgacaaaggctacaccgtggccgacccaaatctggacgaactttttcagctgtacagccagccgggtcatgcctactgggtcatcgagcaggacggccaggtcgtgggcggcggcggcattgccccactgctttgcagcgagccggatatctgtgaactccagaaaatgtatttcctgccaacgatacgcggacaaggcctggcgaaaaagctggcgctggtcgccctggaacatgcacgctcacagggctttaaacgttgctaccttgaaaccaccgctttccttaaagaggccattggcctgtatgaacatctcggctttgagcatatcgatgcgccactgggctgcacgggccacgtggactgcgaagtcaggatgctgaaaagtctgtaagttttgttcctgccgtcttctgttaagcgtctgtaaactgaatgctctacactcacagttcacaccaaaacaggggaaaagcgatgtcgaagataaaaagctacgccgcaccgcaggcgggtgcagaacttgagctgtacgagtacgatgcgggcgaactaaaagcggaagacgtcgaagtacaggttgattactgcgggatctgccactcagatctctcgatgatcgacaatgaatggggcttctccagctatccgctggtggccgggcacgaagtcattggccgcgtcgtggcgctcggcagcgccgcgcaggacaaagggctgaaagtgggccagcgcgtgggtatcggctggacggcacgcagctgcggccactgcgacgcctgtatcagcggcaatcagatcaactgccttgagggcgcaacgccgaccatcctgaacaagggcggtttcgccgataagctgcgcgccgactggcaatgggttatcccgctgccggacagcattgatattgaatccgcaggtccgctgctgtgtggcggtatcaccgtctttaaaccgctgctgatgcatcacgtcaccgccaccagccgcgtgggcgtgatcgggattggcggtctgggccatatcgccatcaagctgctgcacgcgatgggctgtgaagtgacggcgttcagctctaacccggcgaaagagcaggaagtgctggcgatgggtgcggataaagtggtgaacagtcgcgatccccaggcgctcaccgctctggcaggccagtttgacctgatcattaacaccgtgaacgtcgatctcgactggcagccgtactttgaagccctggcctacggcggtaacttccacaccgtgggtgcggtgatgaagccgctgccggttccggcgtttaccctgatcggcggcgatcgcagcatatccggctctgctaccggcacaccatatgagttacgcaagctgatgaagtttgccggacgcacaaaagtggcgccaaccaccgagctgtatccgatgtcaaaaatcaacgaagcgatccagcacgtgcgcgacggcaaagcccgctaccgcgtggtgttgaaagcggatttctgatgtgagattgccggggaatgtgcggcctgatgccctcaccccaaccctctcccacagggagagggcgcaaacnnnnnnnnnnnnnnnnnnnnnnnnnnnnnnnnnnnnnnnnnnnnnnnnnnnnnnnnnnnnnnnnnnnnnnnnnnnnnnnnnnnnnnnnnnnnnnnnnnnnnnnnnnnnnnnnnnnnnnnnnnnnnnnnnnnnnnnnnnnnnnnnnnnnnnnnnnnnnnnnnnnnnnnnnnnnnnnnnnnnnnnnnnnnnnnnnnnnnnnnnnnnnnnnnnnnnnnnnnnnnnnnnnnnnnnnnnnnnnnnaacaactaaaacggtaacggttgttaccgttttgcatctaccatggtcttaaacacttccgccaccgcgaccgcccccggatccatcaccccgtccagattctctttattcacgtacgacgagcgtcccgcgccggctttcgccattttcgccgttgcttcagccccttgctgcgcggcctgcgctgccgcctgaatattgcctttctgtaacgcctccagcgccggttgcagggcatcgatcagcgtacgatcgccgagatctgcaccgccatactgcttcatctgcgccagtccgctcagcaatgcttcaggtagcgactgtccatcgtgaagcttttgtcctgccgcagtgaagaagatcgacatcaacaccccactcgatccgcccatcaccgttgccagccgctcgccaaccagcaggaggaatgtcggcacgtcgttaaggggcaggttgttctcctcaagtcgctgcgcaatatcccgcgccccttgcgcaaaggtggagcccgtatcgccatcgcctactttggcatccagcgcgttaaggcgattttccagctggatcaatgttttcgttaccgaggcgacggcctcgctcacctgcggattgtccgacggggtatattccacgcgatcatgaagggcgctatgggggacggtacgcaggggcgcgaacgcgacgggcttctgccagcccagcgtctcgacctcggcgtgaatcgccttctcgaagaaatcgttgagctttaacagcgttagcgaaaagcctttcatatccagcgcactcaccagcggcgccgggccaatcagatacgcaatgttctctttcaacgccgaatgcgccagctctttggtgagcagagccatctccagcgctgacacgccgccgaggttgttgatcagcaccgcaaagcgcccgtcacccgcctgggcttttagcggcgtcaccagcgtatcgataatcgccctgctgttctgcgtatccaccaccgatgcccccggctcgccgtgaatccccagccccagctccacgtggccttgcctgatgcgtccttcttcatcatcgctacccggcaggttacaggtttgcatcgcaacccccaggctccagaggttatcgcaggcctgttgtgcaatatcccgcacgtcgtttagcgatttcccctgttctgccgcatatcccgcaatcttatgcaccagcgccgttcccgcgataccacgcggctgcttgttatccggtagggcgatatcatccgccacgataaccatctcgaccttcaggccgtagcgtttggctttttccgccgccaggccaaagttaagccggtcaccggtgtagtttttcacaatcagcaggcagccacgatcgcccgtcaccgccacaatggcattgaggaccgcatccacgcttggggaagcgaacagatcgccacacaccgctgcggtaagcatgcctttaccgacgaacccggcatgtgccggttcatggccggagccgccaccggagatcaccgccacgcggcttttatcccagtcgccgcgagccaccacgcggatggccggatcgatatccagtttgacgagattaccgtgcggcgcggagagaagtatgccttcaatggcatcgttgacaagctgtttgcggtcgttaaaaaagaatctggacatagtttcccaaaattttgtttaccgtatgcaaaagcatagtccgcactggataatgcgccgcaaagtgaggaatttacgcagacattttgccgtcaggttgcctatactccacccaggactacgagaggacgtgcatcatgagtacaccattgttaatcgccaggacgctggaaaaagagctgtttttactgcccgcgatggcgaaccgtcatggcctgatcaccggcgcgaccgggacgggaaaaaccgtcaccctgcaaaagctggctgagtcgttgtcagagactggcgtgccggtatttatggctgacgtgaagggcgatttaaccggggtggctcaggaaggtgcagcgtcagaaaaactcctcgagcgcctgaaaaatatcggcatcaccgactggacgccgcacggtaatccggtggtggcctgggatatcttcggcgaaaaaggccatccggtgcgcgccaccgtctccgacctcggcccgctgctgctggcccgtctgcttaacctcaacgacgtgcagtccggggtactgaacattatcttccgtatcgccgacgatcaggggctactgctgctcgacttcaaagatctgcgcgccatcacccagtacattggcgataacgccaaatccttccagaaccagtacggcaatatcagcagcgcctcggtgggcgccattcagcgcgggctcctgacgctggagcaacagggtgccgaacacttcttcggcgagccaatgctggatatcaaagactggatgcgtaccgacagcagcggcaaaggcatcatcaacattctgagcgcagagaagctctaccagatgccgaagctttacgccgccagcctgctgtggatgctctctgaactgtacgaacaactgccggaagcaggcgatctggaaaaacccaaactggtgttcttctttgacgaagcgcacctgttgtttaacgacgcgccgcaggtgctgctggataaaattgaacaggttatccgcctgatccgctccaagggtgtcggggtctggtttgtgtcgcaaaacccgtcggatattccggacaacgtactggggcagctgggtaaccgcgtgcagcacgccctgcgcgcctttacgccgagagatcagaaagcggtgaaagccgcggcgcaaaccatgcgtgccaatccggcctttgataccgaaaccgccattcaggcgctgggtaccggtgaagcgctgatttcgttcctcgatgcaaaaggcagcccgacagttgtcgagcgtgcgatggtgattgcgccctgctcgcgcatggggccggtaacggacgatgaacgcaacggcctgattaatcactccccggtgtacgggaagtatgaagacgaggtggatcgcgaatccgcgttcgagatgctgcaaaaaggggtgcaggcgactgccgaatcgcaggatgcccctgccgcaaaagggcaatctgttgccgtggacgacggcattctcggcgggctgaaagatattctgttcggcagcaccgggccacgcggcggcaaacgcgatggcgtggttcagaccatggcaaaaagcgcgacgcgtcagattaccaaccagatagtacgcggcatgctgggaagtctgctaggcggccgtcgccggtagcgggggaacccacgggcggccaagcgccgacccctgtacaccgttctcctgtagatagcggtcgatttccagcatccccgtccagcggttctcacaccagagcggtgccagaagcgttgggcggcgggcgctggccgagatgcggtggtaaacaatctccggaggcgtgtggcgaatcatctcccccgccgtcaccgtatagtcgtcgagttcgataccacttaaccgccccgcttcccaggctttcgccattatgctgcccttcacgatatgcagcggatgcagcttaatgccatccacgccggtctcgacgactttttccagcgtttccagcccgtgctgctgcccttctcctggcaagccgacaatcagatgcgagcagacttttaatccacgctcacgggcgagacgcgtggtgcgctggtagcaggcgaaatcatgcccgcgattgatacggtgcagggttttgtcatgcgcggtctgcaagcccagctccagccagatctcgtagcccttctctttgtactcactaagtaaatccagcacggcctccggcacgcagtccggacgcgtccccacgcacagcccgacaatgttcgcttgagcaaccgcctgctgatacatcgagcgcagtacctgcacctcagcccacgtgctggtgtaggcctggaaataggccagatactgcttcgcgcgattcaccagactcgcctgatgggcgagctgttcagcgatagatttatgctgctgggcctcgtcagcaaacgaggccacgttacagaaagtgcagccaccacgcccgatggtgccatcgcgattcgggcagctaaagccgccgtgcagcgtcagtttgtgaaccttttgcccatagcgctgcaaaagatccccaccaaacatattgactaatttctgtaactgcataatctgatagaccgtcccgaagaaaggggacaagcctgccatttttagcctctgtcggcgatgacctggatcaatcgccttggacggcctttacctgtttgaataaataatcacgattaccgagatttcattcaccctgtacgtaattacttttccttatgttctgatggtttttttcatttatagcgccaggactgaaaaacagtgattttatgcggatttgaatgcaacaccagattaatattctgctaaaaatctgcatttcagcacgctgcatcgataataccgctttcatatagtgagtcagatcacactcccctgcacctccccggtgctttaagtggttgtaaaaatagttaaatacatattaaaaacaaaaagataactacgctttagcacatttttgtataaataagattgccatttgacctgtgtaccaattcccgataagttggaaatccgctggaagctttctggatgagcggcctgctcatcatatttatgcagtaattgagattccctctgaagcaagtcctcaaacttgtttacctgcgcgaaaggatgaaaaagagggcgaatgcgaggtccgcgtatgaaacgctaaccccgtcgccatgctctttctgcgcctgtgcgccacggtaaagttcagtgggaagcccgacgagcctggggaggttcactgatatgttgtacgataaatcccttgagaaggataactgtggtttcggcctgatcgcccacatagaaggcgaacctagccacaaggtagtgcgtactgctattcacgcactggcccgtatgcagcaccgtggcgccatccttgccgatggtaaaaccggcgacggttgcggcctgctgctgcaaaaaccggatcgtttcttccgtatcgtagcggaagagcgcggctggcgtttagccaaaaactacgctgtcggtatgctgttcctgaatcaggatcctgaaaaagctgccgcctcacgccgcatcgttgaagannnnnnnnnnnnnnnnnnnnnnnnnnnnnnnnnnnnnnnnnnnnnnnnnnnnnnnnnnnnnnnnnnnnnnnnnnnnnnnnnnnnnnnnnnnnnnnnnnnnnnnnnnnnnnnnnnnnnnnnnnnnnnnnnnnnnnnnnnnnnnnnnnnnnnnnnnnnnnnnnnnnnnnnnnnnnnnnnnnnnnnnnnnnnnnnnnnnnnnnnnnnnnagaagaacttcagcgtgaaaccctgtcgatcgtcggctggcgcgatgtgccaaccaacgaaggggtgctcggtgaaatcgccctctcctcgctgcctcgtattgaacagatttttgtcaatgcgcctgcgggctggcgtccgcgtgatatggaacgccgtctgtttatcgcccgccgccgcattgaaaaacgtcttcaggatgataaagagttctacgtctgtagcctctctaaccttgtgaacatctataaaggtctgtgtatgccggctgacctgccgcgcttctacctggacctggcggacctgcgtctggaatcggccatttgcctgttccaccagcgcttctccaccaacaccgttccacgctggccgctggcgcagccgttccgctacctggcgcataacggcgagatcaacaccatcaccggcaaccgccagtgggcccgcgcccgtacctataaattccagacgccgctgatcccggacctgcacgatgccgcgccgttcgtgaacgaaaccggctcggactccagctccatggataacatgctggaactgctgctggcgggcgggatggacatcgtgcgcgccatgcgtctgctcgtgccaccggcctggcagaacaacccggatatggaccctgagctgcgcgcgttcttcgactttaactccatgcacatggagccgtgggacggcccggcgggcatcgttatgtccgacggtcgttttgccgcctgtaacctggaccgtaatggtctgcgtccggcgcgctacgttattaccaaagacaagctcatcacctgtgcctctgaagtcgggatctgggattaccagccagacgaagtggtcgagaaaggccgcgtcggaccgggcgagctgatggtgatcgacacccgcggtgggcgtattctgcattccgccgaaaccgacaacgatctgaagagccgccatccgtacaaagagtggatggagaaaaacgtgcgtcgtctggtgccgtttgaagatctgtcggacgaagaagtgggcagccgcgagctggacgatgacaccctcgcgagcttccagaagcagtttaactacagcgcggaagagctggactcggttatccgcgtgctcggtgaaaacggccaggaagcggtcggctcaatgggtgacgataccccgtttgccgtgctctccagccagccacgcattatttatgactacttccgtcagcagtttgcgcaggtcactaacccgccaatcgatccgctgcgcgaagcccacgtcatgtcgctggccaccagcatcggccgtgagatgaacgtcttctgtgaagctgaaggccaggcgcaccgtctgacctttaaatcaccgatcctgctgtactccgatttcaaacagctcaccaccatgaccgaggagcactatcgcgccgacacgctcgatatcaccttcgacgtgaccgaaacgagcctcgaagagacggtgaacgcgctgtgcgataaagccgagcagatggtgcgtaacggcaccgttctgctggtgctgtctgaccgcaacatcgcgaaaaaccgtctgccggtgcctgcacccatggcggtgggggctatccagacgcgtctggtggacaagagcctgcgctgcgacgccaacatcatcgttgaaaccgcgagcgcgcgcgacccgcaccactttgcggtgctgttaggctttggcgccacggcaatctacccgtatctggcctacgaaacgctggcccgcctggtagatacccgcgcgatcgacaaagactaccgcgccgtgatgctgaactaccgtaacggcatcaacaaaggtctgtacaaaatcatgtccaaaatgggcatctcgaccatcgcctcttaccgctgctcgaagctgtttgaagcagtcggcctgcatgacgacgtcgccaacctctgcttccagggcgtgatcagccgtatcggcggcgccggttttgctgacttccagcaggatctggtgaacctgtcgaaacgcgcctggctggcacgtaagccgctggaacagggcggcctgctgaaatatgtccacgggggtgagtatcacgcttataacccggacgtggtgcgcacgctgcaacaggcagtgcagagcggcgagtacagcgattatcagcagtatgcagagctggtgaataaccgtccggcagcgacgctgcgcgatctcattgccctcaatccaggtgatgaagcggtcagcattgacgaggttgaacccgcgtctgagctgttcaaacgtttcgacaccgcggcgatgtctatcggcgcgctgagcccggaagcccacgaagcgctggcggaagccatgaacagcatcggcggcaactccaactccggcgaaggcggtgaagatccggcccgctatggcaccaataaagtgtcccgtattaagcaggtggcgtctggtcgctttggcgtaacgcctgcgtacctggttaacgccgacgtgattcagattaaagtcgcgcagggtgcgaaaccgggtgaaggcggtcagctgccgggtgataaagtcaccccatacatcgctaagcttcgctattcagtgccgggcgtgacgctgatctccccgccgccgcaccacgatatctactctatcgaggatctggcgcagctgattttcgacctgaaacaggtcaacccgaaagcgatgatctccgtgaagctggtttccgaaccgggcgttggcaccattgccaccggcgtggcgaaagcctatgcggatctgatcaccatcgccggttacgacggcggcaccggcgcaagcccgctctcctccgtgaaatacgcgggttgtccgtgggagcttggcctggtggaaacccagcaggcgctggtcgctaacggcctgcgtcacaagatccgtttgcaggtggacggcggactgaaaaccggcctcgacatcatcaaagcggcgattctgggagcggaaagcttcggctttggtaccggcccgatggttgcgctcggctgtaaatacctgcgtatttgccacctgaacaactgtgcaacgggcgttgctacccaggacgaaaagctgcgtaaaaatcactaccacggcctgccgttcaaagtgaccaactactttgacttcatcgcccgtgaaacccgcgagctgatggcgcagctgggcgtgaagcgtctggtagacctgattggccgtaccgacctgctgaaagagcttgagggcttcacggccaagcagcagaagctggagctgtctaagctgctggaaaccgctcagccgcatcctggcaaagcggtttactgtaccgagaacaacccgccgttcgacaacggcgtgctgaacgcacagctgctgcaacaggcgaagccgtatgtggatgagaagcagagcaaaacgttctggtttgatatccgcaacaccgaccgttccgtgggtgcgtccctctccggttacatcgcgcaaacgcacggtgaccagggtctggcgtcggatccgattaccgcgcacttcagcggtaccgcgggtcagagcttcggcgtgtggaacgcaggcggagttgagttatacctgaccggcgatgccaacgactacgtcggaaaaggcatggcgggcggtctgctggcggtgcgtcctccggttggttcagccttccgcagccatgaagcgagcatcatcggcaatacctgtctgtacggcgcaaccggcggtcgtctgtttgccgcgggccgtgcgggcgaacgttttgcggtgcgtaactccggcgccatcaccgtggtggaaggcatcggcgataacggctgtgaatacatgacgggcggaattgtgtgcgtcctgggtaaaaccggcgtgaactttggcgcgggcatgacgggcggttttgcctacgtcctggatgaagacggtgagttccgcaaacgcgtgaacccggagctggtggaagtgctggacgttgatacgctggccatccacgaagaacacctgcgcggtttaattaccgaacacgtgcagcataccggttcttcgcgcggcgaagagatcctggccaactggccggcgttctctgcgaaattcgcgctggtgaagccgaagtccagcgatgttaaagccctgttgggtcaccgtagtcgtagcgcagcagagctgcgcgtgcaggcgcagtaaggaattcagatgagccagaacgtttaccagtttatcgaccttcagcgtgttgatccgccaaagaaaccgctgaagatccgtaaaattgaatttgttgaaatctatgagccgttttcagaaggccaggccaaagcacaggcagaccgctgcctgtcctgcggtaacccttactgcgaatggaagtgtccggtccataactacatcccgaactggctgaagctggccaacgaagggcgtatttttgaagccgccgagctgtctcatcagaccaacaccctgccggaagtgtgcggccgcgtgtgccctcaggatcgtctgtgtgaaggctcctgtacgctgaacgacgagtttggcgcggtaaccatcggcaacatcgaacgctatatcaacgataaagcgttcgagatgggctggcgcccggatatgaccggtgtgcgtcaaaccgacaagcgcgtagcgattatcggcgcgggcccggcaggcctggcctgtgcggacgtgctgacccgtaacggcgtgaaggcggtggtctttgatcgccacccggagattggcggcctgctgaccttcggtatcccggccttcaagctggagaaagaggtgatgacccgccgccgcgaaatnnnnnnnnnnnnnnnnnnnnnnnnnnnnnnnnnnnnnnnnnnnnnnnnnnnnnnnnnnnnnnnnnnnnnnnnnnnnnnnnnnnnnnnnnnnnnnnnnnnnnnnnnnnnnnnnnnnnnnnnnnnnnnnnnnnnnnnnnnnnnnnnnnnnnnnnnnnnnnnnnnnnnnnnnnnnnnnnnnnnnnnnnnnnnnnnnnnnnnnnnnnnnnnnnnnnnnnnnnnnnnnnnnnnnnnnnnnnnnnnnnnnnnnnnnnnnnnnnnnnnnnnnnnnnnnnnnnnnnnnnnnnnnnnnnnnnnnnnnnnnnnnnnnnnnnnnnnnnnnnnnnnnnnnnnnnnnnnnnnnnnnnnnnnnnnnnnnnnnnnnnnnnnnnnnnnnnnnnnnnnnnnnnnnnnnnnnnnnnnnnnnnnnnnnnncaccggcatgggcattgagttcaaactcaacaccgaagtgggccgcgacgtgcagctcgacgacctgctgaaagattacgacgccgtgttcctgggcgtaggcacttatcagtccatgcgcggtggtctggagaacgaagatgcgccaggcgtgtacgacgcgctgccgttcctgattgcgaataccaaacagctaatgggctacggcgagaccgccgatgagccgttcgtcagcatggaaggcaaacgcgtggtggtgctgggcggcggtgataccgcgatggactgcgtgcgtacctccattcgccagaatgcggcgcatgtcatctgtgcctaccgtcgtgacgaagagaacatgccgggctctaagcgcgaagtgaaaaacgcacgtgaagagggcgtcgagttccagttcaacatccagcctctgggtattgaagtgaatgccaacggtaaagtgagcggcgtgaagatggcgcgcacggagatgggtgcgccagatgcgaaaggccgtcgtcgcgcggagatcgtggccggttctgaacacgtgatcccggctgacgccgtggtgatggcgtttggtttccgtcctcacagcatggagtggctggcgaagcacagcgtagagctggactctcaaggccgcatcattgcgccagaaggcagcgataacgcgttccagaccagcaacccgaaaatcttcgccggtggcgacatcgttcgcggctctgacctggtggtcacggcgattgccgaaggccgtaaagcggctgacgggatcatgaacttcctggaagtgtaagcccctctgactccccggcagaagcataaagcggaacgctggggagcctgttttcagtagcctacccttaagttaatggtgcctttttaagcaaaaaagcagcgtaaatcccgacgtaaacgtttgctttcgtgaaaaaaatgtatattatgcggcggattttttggccaaaattcaaggaggcattgtgtcgcaagataacaattatagccagggccccgtccctctggcggcgcggaaaggcgtggttccactcacttttgtgatgttagggttaacgtttttttccgccagtatgtggaccggaggcacgctcggtaccggtctttcctataatgatttcttcctcgcagttctcttcggcaatctcctcctcggtatttacactgcttttcttggctacattggcgcaaaaaccggcctctcaacccatcttcttgcgcgttactcgttcggtataaaaggttcctggcttccctccatgcttttaggcggtacgcaggtagggtggtttggcgtcggcgtagcgatgtttgccatcccggtgagtaaagccacgggcatcgacgtgaacatcctgattgcagtttccggcctgttgatgacgttaaccattttttttggcatctcggcactgacgattttatccatcatcgccgtacccgctatcgtcatcctgggtagctactccgtctggctggcggtggacggcgtgggaggattggaccacctcaaatccattgtgccgcagacgccgctcaacttttccagcgcgctggcgctggtcgtaggctcgtttatcagcgcaggcacgctgaccgccgacttcgtccgctttggccgcaatgccaaaggtgccgttctggtggcgatggtggcatttttccttggcaactcgctgatgtttatcttcggtgcggcaggcgctgccgccgtaggacaggccgatatttctgacgtgatgatcgcccagggactgctgctgccggccattgtcgttcttggcctgaatatctggaccaccaatgacaacgcgttgtacgcctctggtctgggtttcgccaatattactggtctttccagccgtacgctgtcggtggttaatggcattatcggtacgctgtgcgcgctgtggctatacaacaacttcgttggctggctgacctttttgtcggcagcgattccgccggttggcggggtgattatcgccgactacctgattaatcgccgccgctatgccagcttcgaccacgcaaaatttgtgtccgttaactggattgccattttctcggtcgccctgggtgttgctgccgggcactacattccgggaattgtccccgttaacgcagtattgggtggcgtcttcagctatttggtgttaaacccattcgccaaacgtacccttgctaatccttcggaggtttcccatgcagaataattccctcactatccgtcaggcccgtttgcaggggcaagagggtttatggcaaatcacgattgaggacggacgcttcagccgtatcgatcctcaggaaaccgcctctgcgccagtcggtcaggtgctggacgccgaatgcgggctggttatccctcctttcatcgagccgcatatccatctggatacaacgcaaacggcgggtgaaccgaactggaaccagtccggcacgcttttcgagggaatcgagcgctgggccgaacgcaaggcgatgcttacccacgaagacgttaaaactcgcgcgatgcagaccctgaagtggcaaatcgccaacggcattcagtacgtacgtacacacgttgacgtctcggaccccacccttacggcactgaaagccatgctggaggtgaagcaggaagtcgccccgtgggtcgatatgcaaattgtggcattcccgcaggaaggcattctttcttatccgaacggtgaagaactgcttgaggaagccgtgcgtttaggggcggatgtcatcggcgcaatcccccactttgaatttacgcgtgaatatggcgttgagtcgctgcataaaacgttttccctggccagaaagtacgaccgactgatcgatgtccactgtgatgaaattgatgatgaacaatcgcgcttcgttgaaaccgttgccgcactggcacatcgtgacggaatgggttcacgcgtgaccgccagccataccacggcgatgcactcctataatggcgcgtatacgtcccgactgttccgcctgttaaaaatgtcaggcattaacttcgtggcaaacccgctggttaacacgcatttgcagggccgtttcgatacctatcccaaacgccgaggcatcacacgcgtcaaagaaatgctggaagcggagatcaacgtctgctttggtcatgacgacgttttcgatccgtggtatccgctgggaaccgcgaatatgcttcaggttctgcatatggggctgcacgtttgccaactgatgggttacgggcaaataaatgatgggcttaacctgatcactacccacagcgcgaaaacgctcgatttgcaggactatggcgtgcgcgttgggaatacagcaaacctggtgattctcccggcagagaatgggtttgatgcagttcgtcgccagacgccggcacgatactctgttcgccacggcaaggtgattgccgagacggtgcccagccagacaaccttgcacctgacgcagccggaagcggtgacgtttaagcgccagaatatcgaataacattgccggatggcggctgcgccttatccggcctgcaaattacgttatgcccgcaggcctgataagcgaagcgccatcaggcctataaactacgtatccagcaagcgggcgcgtaccttcaccacgactttctttatctcgcctggctcaaggattgcgcatcctggcttatgtggctctcccggcataaatacggcgcacatccccggccggagggtgacacactgttcacctgcaatctcactgcacaactgataatcttcttcaggatgaaaatcttcacgctggcgtgccgagcccgtcacgccaaagaggatgcgctcttctcccgtcaataacacctggatatcaatatattgctcatgcagttccgctttcttctggtctggaaactgcgtggcaaacgtcatcacgttcatgaagatatcctcaccgcgaagctcataacgtcctgccgctttttccagcggacgggcagccagcgcgagggttagcgcctccagaagaacgggatgcaaccccgtggagggaagcgtccgaatctcaccaaaaaacatcatctttctccctgagccaacagcgccgcgcccagtaagcccgcatcgtgtcgatagtgcgcggcggttaattcaacgtgataaacagaaggatgctcctcaagatacgcgcggacccgcgccagataccctcctgccagcccgatgctgccgccaatcaccacgcgctggcagtccatcaccgctttcgtgtcggcaataagccgcgccagtacctgtgcagaacgctggaccagttccgccgcctgtttatttccctctgccgcgcgcgcaaaaatcgtttttgcatcgcatcctgcaagctctcccctggctgcggcggcaataccgcgaccagacgcgatggcttccacgcaccccacgcgaccacagccgcattgcgggccgtttggatcggcgagcgtatgcccaagatgcccagccagtccgccgcttccggtcacgagtttcccgttactgactacgccgccccccacgcccgttgaaacagtcaggaataccatgtctttaatttccttcgcactaacgtgatattccgcccatgccgcagcctgagcatcattgatcgccagggtcggcaaaccagcaatgtcttcgagcgtctgcaccagcggaaaatggtgcaatcctccgagattttgcgggttaatcgccagcagattgccgtcctgaatgattccggttgaggcaatggccgcacgcgttgcctgggtctgtaacggcttgaccagctcagccagcgcctcacgcagtgcgtcaggcgtcttactggcgggcgtagggcattcgcgtcgcgcgtggatctgtaaaccgtcatccaccagggcggcggcaagtttagttccacctatgtctatcgccagtgtcgtcatagcaccgccccgctcggaaatgtttttatcccgttgtgacatacctcatcccttacgaatgtgcccggtacaggtccgggcaagcggattaacttttgcttttcgctaaagcgcttttatcgccgccaaacgggacggctccgctgaaaggtttaccgtcaatagcgtcatgcgtacgcagggcttctggcctgatccagcgctgaacgcgggagggcatatccagaccaataagcaagatcaccacaaacgtcaggccaaaagagagcgatcccagggccgtgcccagcgccatatcctgcgacagcagcgcgccaatcaccggggcaatcgcgccgcccaacgcgccaacgttgtaggtaaagcccagacccgccgcacgctggtcggtatcgaaatagccgccgatgagtttgggtaagatcccggagatcccctgccccagcatctgctggaaaaagagtaacaagcccaacacccagacattggcgccgccgatcgcaaagacgggaacaatcaggagctgtgaggccaacaggctacagacataggccttgcgggtgccaagccagtcaccgagaaaaccacccacgcagcagcctaccgccgcaccgaagccgctaaagaacagcaccttcgccaccgttgacggatcataggccaggtcggttttcagataagtgggtaatagcgcctgaatcggccaggagtagagaaaggcgaagagcacgacaaccatcaacgtgacgcccgtcggccagcgtttaccgctgctttgcaccataaagctgataaagacgatggcgcaaagcaggccgagaataacgaccagccccgcgttgttgagttcgcctgcaaaacagaaccacagcgccgtaccggcaaacagcgtcatcgccatattgatgacgcggtatttgccgcgatacagaatatcaaccatggtgcgcaccggggctttgccttcgtgcttcgctttccagtcctcagcttccggaatatttttccgcagccacagggcaaagacgatgggcagaatgccgataaagaacagcgcccgccagccccagacgggcacgacaaggctgtagacctgggccgcaaccacggcgccgacggagaaaccggaaatcagaaaaccactcgccttgttgcgcaggtgctttggccagctttcaatcacataggttgcgctggagccatattcccccgccatccccatgcctatcaccatgcgggcgataaacagggtgacgtaacccggcgcaaaaccgcaggccagcgtaccgcaggaaaagagcacgatgctggtgatcatcgccagcttgcggccatagcggtcgcccatggcgcccagcagcaggccgccgaaccagcgcgatataaaggccgccgaaatcaggctcgccgcttccactgtcgtcagggcaaactcgctttttatttctgtcaggactaaggctatcaatacaaaatcgaagccatcaagcagatatcccagccaggcggcggagaaggcgcgccactgaggacgggtaagatggcggtaccacgggatgctttgggtagacttactcatttcactctcccgacgatttctctgtcgttttgccggatggcggctgcgccttatccggcctacgtagcatgtttttgtaggccggataaggcgaagcgcccccggctatgcgttagcgtttttccgccattagctgctccgccagcgctttcagcgctggcacgaatttttcatccacaggggcaaacggcttacggcacagcggcacggataccacgtccatatagtgcagaaccgttttcagaccacggaacaccccggctttaatcagcagatcgatcaccgtgttgcattcgctttgcaggcgctgtgcggtggcgttatccccttcacgaaccgctttagcgatcgcctggtagcgccagcccataatgttgtaggtgctgccgatccccccgtccgcgccggccagcaggccggaggcgaagatctcgtcataaccgttgtagagcaccagatccggatgttcacgacggatctgctccatctggaagagatcgccggaggtttgcttcagcgcgccgacgccggggagcgtcaccagcgtgttgatctgatccaggcttaacttcacgccgcttaacgccggaatgttatagaccaccatcggcagaccatccgccgaatcaataattgcacggtaatgatcgcaatgttcttcaaagctaaagggatagtaaaacggtgtgacggcggatacagcgtcaaaaccgacgcgggcggcggccatggctaactgctggctttccgccgtgctgacgcagccaacatgggcgatgagcgtgattttccccttcgcctcttccgccacaatctccatcacctgctctcgttccgaaaggctctgtacaaaggcctctcccgttgaaccgccgacgtacagcccatcgataccctgttcaatattgaaccgcaccagacggcgcaggctttctttatccagcatctgctcagagttaaacggggtcaggagtgcggccattacgccgcgtaattgcgttgccatagttacctcaatcgatcgtgtgtttgttataacgacatacctttatacctgttataccagatcaattaagcagcagtagaatacagaacgcttatattgcgatctgcttcactaaaggatcgttattttttggcttttgaatgctggccgaaagcgtgccaggtggcggagacgctgttaaggtgagtttgcaacgcccgatccgcttcatcgggatcgcggcggcggatcgcatccacaattgcgatatgctggcgatagctgacttcattatgctgataaagctctgcgtccggcactttaggacgcgccgcaattaaccagtcaagcagcgcaacgtggatcgcattgaagatcggattgccggggatctccgccagcacgcggtgaaaatcgacatcggaacgaataaatagcgtgttgtcatccagggactggctgttgatctccacggctttcgtgagctgcgcaatctgatcgtcagtggcatattctgcggcataacggacaaggctggattcaaagaacaggcgaagctgctcgaaatgggcaataccgccgggctgggtcagaaagtctttcgccattcccgacaattcactgatgatggtatcggcagacggcatggttacgcgggcacgttcaccgttgttaatctgcaccagccctttacgctttagcgccgccagcgcttcgcgcaccgaggggcgacccacgttgaagaactccatcagttcgcgctcggagggtaactgctctccctgggcaaattccttccgacggatcatctgctccagctcttcttccaccatatcagacagttttttgcgcgccagcggccgacggcgcaggctgcgaccaatgatttcatcagagttttcagctttaagatcagtcggtttcattgcagtccggtgccattgaaggaaaacagttcatcataacacaggaaattagagggggcgaaaagggacggaaagcaaaacaggcccgtcgggcctgtttgtttatttcacaacgcgcagtgcgggacgaccaccgcgtggtggtggctcgtcatccggatcggtgtcatcattatgatcgggtttatcgccatcgatgacagacattaccgtgtcgctttcgcgttcatcggatgcctcatcatcattcaggctggcaacctcttcatcataagccgcttccggctcaaacatggtgcccgcaccgttttcacgggcgtagatagccagcacagctgccagcggcacggaaacctgacgcggcacgccgccgaagcgcgcattaaagcgcacttcgtcgttcgccagctccaggttacccactgcgcgtggcgcaatattcagtacaatctgtccgtcgcgcgcgtattccattggaaccagcacgcccggcaacgtcacatccacaaccaggtgcggcgtgagctggttatccagcagccattcatagaaggcgcgcagcagatacggacggcgtggtgaaagttgtgacatttccacagtcattagcctcggccgagacgcatttcacgttccggttcagttaaagatgccaggaaagagtcgcgctcaaagacgcgagtcatgtagcctttcagctctttcgcgccagggccgctgaactctacgcccagggttggcagacgccacagcaacggagccaggtagcaatccaccaggctgaactcgtcgctcaggaagaaaggcttctgaccaaagactggcgcgattgccagcagctcttcacgcagctgtttacgtgcagcatccgcttcagaagaggaaccgttgacgataacgttcatcagcgagtaccagtctttctcgatacgctgcatgtacaggcggctttcaccacgcgcaacaggataaacaggcatcagcggcggatgcgggaaacgctcatccaggtattccataatgatacgggattcccacagggtcagctcgcgatccaccagcgtcggtacgctttggctcgggttgagatcgatcagatcctgaggcgggttatccttttccacatgctcgatctcaaaactgacacccttctcggccagcacgatacgaacctgatggctataaatgtcagtaggaccagaaaacagcgtcattaccgaacgtttgttggcagcgacagccatgaaaacctccaggtatattcagaatttttactgctaccagcccaacggggccagccagatgatgtatcgcccatcccagagaagacacattgttcaagaatcgaacaaaaatcgagtattcaccgatatttgggcagaaaattggatgatagtttaccagattttgatggctttgtggtgaggggattccggaaatgtggaaaaagagaagatatatgaaatgttactgtggataacctgcgcattatccataaaaaaacccgccgaagcgggtttttcgccaatcgttctgcgtaagcagaatggattaacgtttggagaactgtggacgacgacgtgctttacgcagacccactttcttacgttcaacctgacgagcgtcacgagtaacgaagccagctttacgcagttcagaacgcagggattcgtcgtactccatcagcgcgcgggtgataccgtgacggatcgcacctgcctgaccggagataccaccacctttaacggtgatgtacagatccagtttttctaccatatcaaccagttccagcggctggcgaactaccatgcgggcagtttcgcgaccgaagtattgttccagagaacgctggttgattacgattttaccactgcccggtttgatgaaaacgcgagctgcggaacttttgcggcgaccagtgccgtagtattgattttcagccattgcctataatcccgattagatgtcaagaacttgcggttgctgtgccgcgtggttgtgctcgttgcctgcgtaaactttcagtttacggaacatagcacgacccagcgggccttttggcagcatgcctttaaccgcgatttcaatcacacgctcaggacggcgggcaatcatctcttcaaaggtcgcttctttgataccaccgatgtggccggtgtggtggtagtacattttgtcagtacgcttgttgccggtaacagcaactttgtcagcgttcagaacgatgatgtaatcaccggtatcaacgtgcggagtgtattccgctttatgcttaccgcgcaggcgacgagccagttcagtagccagacggcccagagttttaccggtcgcgtcaacaacataccagtcgcgctgtacggtttctggtttagctgtaaaagttttcattaaaagcttacccaaataataagttacacgttggtgaacacccaaacgtttagtcagttgaggttcacacgacaaagtccggcaaacctaccccttcgaatagcacatgccgacacatagaaagtttcgggaaaaaaaccttctcgtaacgtggggtcgcaagattatagagaagttgaggtcaaagatcgacccttaaatgtgatttggaatgggtttttcggggtcaggtattgtgcggtctggtgccctcacccccagcccctctcccacagggagaggggaacatttattatggcatatgctcacgcttgaggtactcttcgctctgcatctcttgcaggcgcgacaggcagcgctggaactcaaacttcaggcgctcgccctgataaacctcatataaaggcacttcggcgctgaccaccagcttaacgtggcgctcgtaaaactcatctaccagcgcgatgaagcggcgcgcttcgctctccatgagtggggtcataacgggcacatcccacaacataacggtatggaacagacgcgaaagcgcaatgtagtcatgctggctgcgggcgtccacgcagagcgttgcaaacgagacggccagcgtctggttttctacgccaagcgtcggcaacggacgatgattaatctccagcgctggcgcgttaccccgcggcgcgcccgccagcgccagccacagtttatccatctcgcgggctgtgtcggcgttcaatggcgaaagccacaggtgtgcctgcgttaatgtgcgcagacgataatcgacgccggcatcgacgttcatgatgtcgcagtgctgtttgatagcatcaatggccggcaggaaacgtgcccgctggagaccattgcgataaagctcatccggcgggatattggaggtcgccaccagagtgatcccacgcgcaaacagcgctttcatgaggccccccaacagcatggcatccgtaatatcggaaacaaagaactcgtcgaagcagagcacgtccgtttccgccttaaagcgatcggccacaatgtccagcgggtcggtttcgccctggagcgccgtcagctcttcatggacccgcagcataaaacggtgaaagtgcaggcgctgcttacgcgtgccgggcaggctctggtagaacatgtccatcagccaggtcttaccccgcccaacgccgccccacatatataagccacgaaccggtgcgtttaccgtgggctcttttttgcccagtaaacggccgaatgccgccttcagcccactgctctgcaccgcatcggcgggtttcgccagaagttcctgataaatcgtgtccaggcggttaaccgcttcacgctggacatcatccggctggtgtgtgccctcgctcagggccagttggtaacgcgatgaaggggacaggttttgcatgatgttgttgttattcctttagttaaacctcaccagcgcgcgtggctgatgaaaaaaaggccgttctacactacgcgatgatacgtcaggattccacttctgcggaaatagcggttatagtggcataatcaggcacaggcaggagccgagccaacaccctacggaacaacaagacaacgggagaagttcatgacctgggaatatgcgctaatcggtttagtcgtcggcatcatcattggtgctgtggccatgcgtttcggtaaccgcaaattgcgtcagcagcagtcactgcaatacgaactggaaaagaacaaagccgaactggaagaatatcgcgaagagctggtcagccactttgcccgtagcgctgagctgctggacaacatggcgacagattatcgccagctctaccagcacatggcgaaaagctccagcagcctgctgccggaaatgaccgcggagaccaaccccttccgcaatcgtctggctgattctgaagccggtaacgatcaggctccggttcagatgccacgcgactattcagacggcgcgtccggcctgctgcgcggtggcgtaaaacgcgattaatcgcacaacctgaataaattttacgggcgcaccttatgcgcccatcctttcttcccgtccccagctattatttagtcaaacacctcattgttcagcggttgaaaattcaataacatcaagatgtttttggggccgttctttttcattccaggatacgagagtcagcatcaatgaagaaaaaaaaccagctgttgagcgccttagcgttaagtgtcgggttatctctctcggcgtccttccccgccagtgcggcactgccttcgcaggtgcctggacaagaagccattcccagccttgcgccgatgcttgaaaaagtcctgcctgcggtagtcagcgttcaggtggaagggacggcacgccaaagccagcgtattcctgaagagctgaagaaatattttggcgaagacgcgccggatcagcaggctcagccgtttgaaggcctgggctcaggggtgattatcgacgcggctaagggctatatcctgaccaataaccacgtgatcagccaggccgataaaatcagcgttcagctgaacgatggtcgggagtttgacgccaaactgatcggcggtgacgatcagagtgatatcgccctgctacaggtgcaaaaccccagcaacctgacccagatcgccattgcagattccgataagctgcgcgtcggtgattttgccgtcgcggtcggtaacccgttcggtttaggccagaccgccacctccgggattgtctccgccctggggcgcagcggcctgaatctcgaagggctggaaaacttcatccagaccgatgcctccatcaaccggggcaactccggcggtgcgctgcttaatctgaacggcgagctgatcggcatcaacaccgctatcctcgcgccaggcggcggcagcatcgggattggttttgccattccgagtaacatggcgaaaaccctgtctcaacagctgattcagtttggcgaggttaagcgcggtctgctgggcatcaaaggcatggagatgagcgccgatatcgccaaagcctttaagctcaacgtccagcgcggggcgtttgtcagcgaagtgctgcccaactcaggctctgcgaaagcgggcgtgaaatccggcgacattattgtcagcctgaacgataaaccgctgagcagcttcgctgaattacgatcacgtattgccaccacggagccgggcgctaaagtgaagctgggcctgatccgtgagggcaaaccgctgaccgtggaagtgacgctggacaagagcacctcctcttccgccagcgcagaacagatctccccggctctacagggcgctacgctgagcgacggtcagcttaaaaacggcacgaaaggcattaccgtcactaccgttgagaagagcagcccggccgcgcaggcaggtttacatcaggacgacgtgatcgtgggcgtgaaccgcactcgcgtgcagtctattgccgaaatgcgtaaggtgctggagagtaaaccggcggtcattgccctgcaaattatccgtggcaacgacaccctctacattttactgcgttaaccatttgcgactccggacatcgccgctgcgtgtgatgtccggataactcatgttatgctgcaaaccgttccttttttaacgacacacgcatcatgcttttaaagctctttcgttcaattgtcattggtttgatcgttgccggtctgctgctggtggctatgccatctttacgccagttcaacaaactgtcggctcctcagttcgacagcacggatgaaacgcctgcaacgtacaatcaggcggtacgccgtgccgcccccgccgtggttaacgtctataaccgcgggcttaacagttccgctcataaccagcttgagatccgcacgctcggttccggtgtgatcatggatgaccggggctacatcatcaccaataaacacgtcattaacgatgccgaccagattatcgtcgccttacaggatggccgcgtgtttgaagccctgctggtggggtcggacagccttaccgacctggcggtgctgaagatcaacgccacaggcggtctgccgacaatcccgattaatcgcaaacgcaccccgcacatcggcgatgtggtgctggcgatcggtaacccgtacaacctgggccagaccatcactcaggggatcatcagcgcgaccggtcgtatcggcctgaacccgtcagggcggcagaacttcctgcaaaccgatgcctcaatcaaccacggtaactccggcggtgcgctggtgaactctctcggcgaactgatgggcattaacaccctctcgttcgacaagagcaacgacggcgaaacgccggaagggattggctttgccattccgttccagctggcgaccaagatcatggacaagctgatccgcgatggccgcgtgatccgtggctacatcggtattggcgggcgtgaaatcgcgccgatgcatacgcagggcggtggtatcgatcagatccaggggattgtggtcaacgaagtggcgcctggcggcccggcggccaacgcaggtatccaggtgaacgacgttatcctttccgtcaacggtacgccagcggtctctgcgctggaaaccatggaccaggtggctgagattcgcccgggctccatcatccctgttgaagtcatgcgtaatgacaagaagctgacgattcaggtcaccatccaggaatacccggccactaactgacgggcataaaaaaacggagcttaacgctccgttttttttaccgggataagatcacttgttaacgaattcttcgcccagcgtaatgtctttcttcagcgtatccagcatgccttccatcgcgttttgctcaaacgcgctcagcgtgccgatagacttacgctcttcaacaccgtttttacccagcagcagcggctgagagaagaagcgcgcgtgttcaccgtcgccttcaacataggcgcattcaacaacgcctttttcgccctgcaacgcgcgaaccagagacaggccgaaacgtgccgccgcctggcccatagacagggttgcagaaccgccacccgccttcgcttccaccacttcggtgcctgcgttctgaatacgtttggtcagatcagccacttcctgctcggtgaaactcacgcccgggatctgcgacagcagaggcaggatggtcacgccagagtgaccgccgataaccggcacttccacttccgttggctgcttgcctttcagctcagccacgaaggtattggagcggatgatatccagcgtagttacgccgaacagtttgttcttgtcgtaaacgcccgctttcttcagcacttctgctgcgatagcaacggtggtgttcaccgggttggtgatgatcccgatgcacgctttcgggcaggtttcagcaatctgctgaaccaggtttttcacgatgcccgcgttgacgttgaacaggtctgaacgatccatacccggtttacgcgcaacacccgcggagatcagcaccacgtcggcaccctgcaacgcaggacgcgcatcttcaccggagaagcctttgattttcacagctgtcgggatgtggctcaggtcaaccgccacacctggggttaccggagcaatatcgtacagggagagttctgagcctgaaggcagttgggttttcagtagtagggcaagcgcctggccgataccaccagcagcgccgaggactgcgactttcatcctaaactccttattatggttaacttaagtatctgtaactccgttgcggcgaccataattcagcacgtcattaattacaattttcatcgctaaagaatttgaggtcgcacgtctttcgccttcacctgaatactatcgggatgtaggcaacaacgaattaagagggggttacaatacaccctgccacgccaccaaaacaacatcattttgataacatttaatttacttttaagcttatttgcgcggcgtgacccaggcatgttttccgataacgaaatctgataaaatctctccctttcataacattatttcagcctggcgccaggtagataatttgcataaaaattcatccacatgcataataatgttgtttctatcgtcatattccgggtgacttatgcgaagctcgtctaagcaagaagaattagtgaaggcgtttaaagcgctactcaaagaagagaaattcagttctcagggagaaattgttcaggcgttgcaggaacaaggcttcgacaacatcaaccagtcgaaggtctctcgcatgttaaccaagtttggagcggtgcgtacgcgcaacgccaaaatggaaatggtttattgcctgcctgctgaacttggcgtgccaacgacctccagcccgctgaaaaacctggttctggacatcgactacaacgatgccgtggtcgtgatccacaccagcccgggcgcagcccagctgattgcccgcctgctggactcgctgggtaaagcagaggggatcctcggaactatcgctggcgatgacaccatttttaccaccccggcaaatggtttctcggtgaaagacctctacgaagcgattctggtcctgttcgaacaggagctgtaattgtctgccccgtagcgcctggctgcggggatcattctgctcttgcctcgttttaccctgcttttctctgcctgctacttttgcaaatagtgctttttaccgcctgttaacattcattcagtgaatgatatgccgcaaaatcgcactaaaaatcaaattgtcctatccctttgatttacataagaaaaaaccacaaacctcgcattgtgacgcccttttttatgcattctcgttataaaaaatgaattttttaacgcgtaataacagacgaaaccattagtctggtattaattttttgcgtgattagtgtatacttgattttgtgatgagggtcacagaacaaagaccccagtaaaataattgacgaggtaaataatcatgaaaattaaaaccactgtagctgccctgagcgtactgtcagtcctgtcattcggtgcgtttgcagccgacaccatcaatgctgaacaggcacaatcccgtcaggctatcgggactgtttctgttggcgccatcggtacgtctccgatggacatgcacgaaatgctgaacaaaaaagcggaagaacagggtgcgtcatcctatcgcatcatcgaagcgcgcagtggcgaccactggcacgctaccgcagaactgtacaaataaaccctcgtcgtatctcatcatacgacttgcccctgacctcccggtcaggggcttttttatcactggcgcacgttgaaacgcagttgcccttccagctcctcctccgcttcatcaaacaataaaatcaatgcaccaaagcgtctgcgtagtttttcaggcagatgggtaaattcgatttccagcggtaacggcagacgatcgccggtaaccacatcccacagcatatcaagattgcttacgctgccccgctccaggtcgaacgcccgaataaactcgcgatagaagtcttcctgactctcaatttcgtcaaaatcaaaggtataaattttcattgccagccacccggtacaggcgggcggcaaatgccgccctgtctattataatcccccgatatgcagggttttgacttccagaaactcctccagccccagcacggacccttcgcggcccagcccggactcttttacgcccccaaacggacccagctcggtcgagaccgcacattcattaattccgatcatgccgctctcaatggcctgcgagacgcggaacacgcgcgagagattctgggtataaaagtaggctgccagcccgtaaggcgtattgttagcgcgcataaccacttcgtcttccgacgtgaagcggaagcaggcggcaacgggaccaaaggtctcctcttctgccagcttcatgccttcatggcagtcaccgagtacggttggcatccagaagttgccgccaagttcgtgcggtttacccccagccagcaccgtggcgcccttcgctaccgcatcttcgacgtgctcacggactttttcgacagccgaaggctcaatcagcgggccgacaacgacgccctcgtccagaccgttacccaccttcagcgccttcaccgcatcggcaagttgattgacaaacttgtcatagaccgtctcctgaatatagaaacggtttacgctgacgcagacctgcccggcgttacggaacttattggcaatcgcgcctttgacggcggcctcaatatccgcgtcctcgaaaacgatatatggcgcattaccgcccagctccatcgatacctttttcatggtctctgcggaattgcgaaccagcgttttcccgacggcggttgatccggtaaacgagattttgcgcacgtcatggctggccataatggcgtcactaatttctgaggtgctccccgcgaccgcattcagcacaccgtccggcacaccggcctgcttcgccagcgtcagcagcgcaaaggcgctcagcggcgtgttgtttgcaggcttgatgacgccggtacatcctgctgccagcgccggaccgagcttacgggtgagcatggccatcgggaaattccatggcgtgatagcagcaaccaccccgacaggttcacgagtggccagaatacgggagccgggtttaaccggaggaatgatttcaccgttggcgcgcttggcctgctcggcaaaccactgaatgaagctggcagcgtagtccacctcaccttcagcctctttcagcggcttgccctgctcggtagtcatcagtcgcccgagccagcttttattctcgataatcagttcataccagcgatagaggatcgtgaagcgctcttttgccgtttttgcgcgccatgcgggaaaggccttcgtcgcggccgcaatggcctcttcggtttcggctttccctgctttcgccactttcgcgaccacctcgcccgtggcggggtttagcacatcaaacgtggtgtcgagtgttttccagataccgttgaccagatacccggtctgaaaaagaatactgtcctgaagagcctgggttgtcatgtgtcctcccttcctgaatgtttgaacctgcaagaataagtatagccacaaaaaaaccgacgcttttggcgtcggttttctcttcgttagctgtctgtcagcgcattctggtagcggtgcagcataaacaccagtcgctctaccggctcggtaacctgcggcggcgcttcccagatccgcagtttctcctggtagatatccagttcctccagcagttgcttaaagtagcggcgacgtttgtcatcactcgatgccgatatcacatggtccgccgttcgccgtagctggcggtggtaggcggacaaatcgtcgttgatcggcactggcgcgttccgcagacgctggtgcgcgataatcatggttaacgccaggcggaagcgggcgacatcgcccgggaatttattcagcaacaggaacagctgttgatagagcgccggcaggtggttctccttgcgccgcgcggtgttggtagtcaatgacgatacggcggccgacacaaactgattcagcagcacacgccctgtccgcgcctgagagttatcccgcaccagcaggatcaccatcatcgccaggaaacagcccaccagctgacctaatgcgctatccaggaactggctgaaatggaaggtcatcgggttatccagcacgatgatgttaatcgtgctcgccagcgcacccaacgatcccagacggcgtttttgtacctcaatcccgataaagaacgccatcaccgccaggctgatgcagagcaaaagcatgctttgctgcgtcgagggaataatcaccaggaagtagagcgcaccaatgggtaacgccgcaatggtgccgtacagaaaatcgatcgcgaccatgcgcgggttgggcagacgcatcgccagcgcggtgacgacggcaatcatcaccatcgcgccgctgccggacgtccagccggtccacagccagaacagcgtgccgagtatacaagccagggtggtacgccagaagttaaccatcgcatggtggcgctcggcggactccggtttgatcaccacttcgccctgcaatacctcttcttccgccgcactgattttggtgttgctaatcacgccgcgtttcaggagcaggtagcgcgttgcggcgccaacccaggtataaatggtgactggcgtatcccgttctcctgtccaggcaatcacacgacgcatgcgtttaagctgtcgatgcacgtcctgcaccgtctccacgggctcatcaaacagttcgcggaaagtatccgttaccacttcggggcgggtgttctgaatcaggtaggtttcacacgcctgggtgatcagcgttaacgagacggtattgatcgctttcagacgacgattggcccgctcccagcgggaagactccatgttgagattactgcgcatcccttccagcgcctgcgtgcggcgcaccagcgcgctccaggccttgtcgacctcttcgctgtcgccgtgcttaatgcacagctgcataagctggtactgagcaacaatcagcgcgtccagctcacgatcgacttcctgcttgatggatcgcggagagaagagcagatctgcgacaatcgcgcagacgataccaatgacaatctcgctacaacgttccacggcgaactgcggagcaagcagcggttcactctgaatggtgatgataataatcagcgcggtataccccgccagaccccaggcgtacgagttctccaccttcaccagcgaagagacccaggtgcaaaaacccgcccagatacagcacacaatcagcatcagcagcggcgtgcggatcatcaggatgataatggtcagggcggcgatacagccgataaaggtgccgataatacgcagcatcccgcgatagcgaattgccccggagtaaggttcgccacccgccgcgaaggctggaccggcggcgacgatcgcggcggtcagaacggcccagcgcggcgtttcaagctggaaatggaagccaacaaacagcgccagcacaatggcgcatgccagcttcacggcgaagcggatgtgctggctggcgatggaaaaaatgcccatagcgatcaaccaaactcgcgcaggcgatgggcgatttgacggaagatagaatcctggctggcatcacggtctttttcacccgtgatcaccaccgtcgcggtggtgcctgcgggccagaggttgctctgctgctcatccagacgaatgcgtaccggtacgcgctgcgccaggcgaacccactcgaggttagaatcgacggtcgccatcccttttgtatcattggtactgctggagttggtcacccccgcggccacgctgtccacggttcccttcaggacccggttgctgccgagcggcgtgatttcggcgcgatagcccggacgcacgccttccagcttggtctcttccatataggcgaggacgtagaaggagttctgtttcaccagcgccacggcagttgagccgcgcgtgataaactcacccgcatagacgttgaggttggtcacccagccatcggacggggcgcggataacggtacgttccagatcgagcttcgccagatcgcgcgtcgcctgcgcttttgccagctgatgcagcacggtttgcagcacgttattagactggtcaatctcttcccgggacatagcctggatgcccagcttgttacggcgacctgcttcacggcgtttttcagcggccagcgcgttgtaatacgccacgtcggcttccgcttcttccagcgctttttgatagcgcggctggtcgatggtgaacagtacctgatcttttttcaccagttggttatcgtggacgttgaccgccgtaatgagaccggcgacatcgggcgctatcgcgaccacctccgcgctgaaacgcgcatcgcgcgtccacggggattcggtgtaataaacccaggcgcgaaaaatagcgatgaacgccaggatgaccagcgccatagtgatggcagtgcgggagatttttcttgttagcgttttcacatcaacctcagacaaacatgcgcgatattaaatagaacaggcagcaatacagcgcggtattgaacaatgcaggatgccagacgaaatcataaatcccggtagggaccagcaccttgcgcaccagccagaagatcgccagtgataaaagaagctcgaaaaatatcggtgggaacgacaaaccgaacaccacgataacgggaaacagactcatgttgaccttgattaaagagagtgcaggttactggatttttaagctcgcgccgccgcaggagagcaagaattgccgggcgagagtggcgcagccgttatgtaattaataatatattaacgtaactgttatgctgttatctatcatatgtgatctaaatcacttttaagccagagtgaataatggaacgtctaaaacgcatgtccgtctttgcgaaagtggttgagcaaggctcttttaccgccgcagcacgtcagctacaaatgagcgtctcatccattagccagacagtgtcaaaactggaagatgagctccaggtgaagctgctcaaccgcagcacccgcagcatcgggctgacggaagcgggtaaaatttactatcagggctgccgtcgaatgctgcatgaggtgcaggatgttcacgagcagctctatgcctttaacaacacgcctatcggcacgctgcgtatcgggtgttcttcaactatggcacaaaatgttctcgctgccatgacggcggaaatgctgaaagagtatcccggtttaaccgttaatctggtaacgggcattccggcaccggacctgattgccgatgggttagacgtggtgatccgcgttggcgcgttgcaggactcaagcctgttctcgcgtcgactgggcagcatgccgatggtggtctgcgcgtcgaaaagctatcttgcacagtatggcgtgccggaaaaacctgccgacctgagcaaccactcgtggctggaatacagcgttcggccagataacgaatttgaactgatcgcgccggaagggctttccactaaactgctgcctgaaggccgcttcgtcaccaacgatccgatgacgatctcccgctggctggtcgccggggccgggatcgcttacgtgccgctgatgtgggtgatcaatgagatcaacagcggcgtactggagatcctcttcccgcgttaccagtccgatccacgtccggtgtacgcgctctataccgaaaaggacaagctgccgctgaaggtgcaggtctgtattaactatctgacggactattttgtcgaagtggcggagctgtttcagggcatgcgaggtagaaggaaagagtaggcttttcccctctccccgttggggagagggttagagtgcgggggaaaatttacgccgtgccgcccaccgtcagattatccactttcagcgtaggctgaccgacgcccacaggcaggctctggccctctttgccgcaaacgcccacgccgttatccagtttcaggtcgttaccgaccatggaaatctgctgcatggcctcaatgccggagccaatcagggttgcgcccttcaccgctttggtcactttgcccttctcaattagatacgcctctgaggtagagaagacaaatttgccggaggtgatatccacctgaccgccgccaaagtttggcgcgaagataccgtaatcaacggattcgataatctcctgcggcgtggactggcccggcagcatgtaagtattggtcatgcgcggcatcggcagatgtgcgtaggattcacgacggccgttacccgtcggcgcaacgcccatcaggcgcgcgttaagcttgtcctgcatgtagcctttcagtacgccattttcgatcagcacgttgtactgacccggcgtaccttcatcgtcgacagaaatcgagccgcgacggtcgagcatggtgccatcatccaccacggtacacagttcggaggagacaagctgccccatctgaccgctgaatacggacgtcccgcgacggttgaaatcaccttccaggccgtgaccgaccgcttcgtgcagcagcacgcccggccagcctgcgcccagtaccaccggcaacgtaccggcgggtgcagccacggcagaaagattaaccagcgccatgcgcacggcttcttttgcccatgcatctgcgcgggcttcgccgtcaacatcgcccaggaaccagtcatagccaaaacgaccgccgccaccgcttgagccgcgctcgcgcttgccgtcgtcttcaacctgaacgctaatagaaagacgcaccagcggacgcacgtcggcggccagcgtaccgtccgtcgccgccaccagaatcagttcataaaccccggtcaggctggcagagacttcctgcacgcgtttatccgccgcgcgagccactttgtccacgcgacgcaggatgtccagcttctcctcgcggctcatgctttgcagcgggtcgatgctggtatagagcgcagcgtgctgcacttcacccagcgttttcacccgtccgtcgcccgtatcgcgcacaatggttcgcgccgcctgcgcgctctgctccagcgcggccaggcttatctggtctgcataggcaaaaccggttttttcgccgctgacggcgcgcacgccgacaccctggtcaatgttataagagccatctttaatgatgctgtcttctaaaacccaggattcgtgatagctcgactggaaatagagatcgccgtagtcgaggcggcgttcggtcagttgaccaagaatggagaacaggtcctgatggctcaggccgttcgctgcgagcaaatgttcacttaccaggttcagactcatctattgctactcgttcgttgccgccagtggcggtataaagatcgtatttattgagagtgaggcaattacctgcccacgtcaaatcattgctgtgcttctttgcgcggctggcgcagcacctcattaatctgtggtttatcaaccggcccggtaatgcgatagcgcagaatcgagactttgctccagagcggccccagcactttactggctgcaaacaccgccgccccgacgatcggattgaccacaaacgctgccgcaacgcccacgcttgcggaaatctccggcgccaccacggcttccatatccagctcgcggcgcacgagatccactgaccctttcatcgcgatatccgcttccaggccgtccaccagcgtgtcgtcggtgtgcagaacgccgtctttgatccacgccgtactgcgaatggaatcgtagtagaaaccttcgctgaaggtgtcgctaaagtcgaagcgcagcttgcgcagcagcgcgtcaaaactcagcagacgcaggatctgcccggcgcgccccgtgctcacatcggcaatctcacccttaccgaagttggttttcaggatgccgttaagcgaagcttcatcgggtgtccatggcgcagcgcgccagtgcagatcgtaattcacatcgaaggacgatccgcgcagcggggtgctaatgccgaagaagttagccgcggcgtccagcttgttgcctttaatatcgcccttcagcgaggtgcgctgttcacccggtttgttcacccattcgccagcggcagtcatgcggccaaagccggtatccaccagcccgccagtgaggctcagcgtattgccctgaatagcaaaatcaccgtcgatacggccatatttttgcccccacagccagcactccgcacagcgcagctggagatcgggccagccgctgaaatccacgcgcgacgttccactgccactgacaggagaagcgcttgtcgactgtgctttagacgccgtaaaggtcggattgtaatagagataacggatagccgcctgccatggcgcgtgatcgcgcatggtcaacgaaccgttgatctcacgcccctgcgcctcgacctttgagccgtttaccgtcggccgggagacaatactcaggttgttccactgctgcccgcccagcgtcagcgcaggcgtgcgcaaggtaatggactgcgggaactgcgccgtttggtcgacgttttgcccgacacctttctggaacagtgccagccactctgcgccatccatcggcgggagattcagttcaacgcccgcctgctccggcagcggcggcgtggtacggctgtccgtcgtccagatcgccctgtccagcgtcagcttgcggttaagcagccagcggctattgaagtggtttgtgccgccagcatttccggttaaatcgaagctgttaaggttgcccgcaaccttaatgttgacgggcaatgcttcaccgcttttcttattcagcggcgcgggaagttggctgctgaggtttttcagatcgcccgtaatgtcgacgttatagcgcgcaccggcatgataaggcaggtcgatggcgaccttgccattccatgacaccgcgccgtccaccgcattctcaatcggcttcggcagaacatccatgcgtgacggctgccagttcgcgtccatattgaccgccacctggtaggctttatcgccctcgatggtggagaaatcgatattgacgggttgattgaaccaggtcgctttcagcggctcacttttcagcgtgccgttaacaaagctgaactgaccgctgaggttgttcagcgtgctgtccagcggcttgatatagaggctgttgttattaaggcgaacgtcgcctttggcggtggtcatttcaccgtccagcgggatatccagatgtaagcgagcattcacatcgccatctaattgcaactgctgaagggtggctgccagggagtcattcagcggcgtatcttcaaagtacggaccaaccgctttacccggccccttaatatccgcatcaatcagcagtttctctttggagtaatccgggatgtttgccgtcaggttgcttgccgttacgccgcccagcgcaacgctgtccgtcttcatccacaagccgtcattcagaaagttgagttcaatatccagattcttcagcgccggccagtccggctggaaggcataggtggcgttgcgtagcggcaccagaacctggaactggccttcgttgtgcttatacgggaacaggtgcgggttgccgccgtagaccagcgtggcgttatccgcctggccgccctgaatggcgccgctgagatagtccaccagcgctttccccatcaggttttccgggaagtagcgccacgcctgagaaccgtcatccgtgctgatgcccgccagaatacccagccacggctcatcgccttcaggctgtagataacggaaattaccgcgcgcatggaccgctttggctttcacatcgatatcgcggccatcgagctgaaaacctttgtcattcttcagccagttgagggtggcatttcccttttcgatctccagtggcgcacggaagaccgtttcgtacggcattttcgcgtcctgcatttctgccgtcagcctgccgttttccacgcttccttccagtttaccgctgaagtgttcagcacccggcagcagtttccactgtttccaggcgagatttttccatgccgcctgaaaacgcgtcttttccgtggcctggagcggaatatccagcgccagccggtttatctgcccgctcggctgcgtcgccagccagatttcgcccagctccggggagagttttgcggccattgaacgcagcccttcgatcgccgtcagatccaggttactggcgcgaatacgcagctcgtcgctgcgtttaccgtttatcccgccgacgtcctgctccggcatccacgccagcgtcagcgcgccgcgcggccagggtttgttatccatggagatgcgcgtatccggaatagcgaactgccagccgcctttatcctgcgtcacgtgtgcggtgaggttatcgacggaaagttgatgctgatggttttcccctttccagctcgcgcccccctgcttaagccagatatcgccgctggcgaacgtcccgttcgtcagggtcatccagccttccaggctgaagcgcgcggtctccagctgcatgttctgctgtaaccactcaccgagccacggcttcacgtccacgtcgtccgcctgtagccacaccctgccgttgttcagcaggccattgtcgtcacgcagatccatccgcacctgcataacgccgtgctgcccgttcaggctggagagattcacctgcccctcggcgcggtggcgatcttctccgtttaaccaggtcagctgtgggatcgccagctcagcgcgctggccggaaagagtaataaagctcacttcgctgtcgcgcagatcgaaatgatcgaactgccgcaggaacagatcgctgatacggctggtttccagcccccgatcgctgtcgccgcttcgcagcggcgtgttagtcatcagctgtagttgccagaaggtgagatcgcgaaactgccagcgcagatgcagcaggctttgccagacatccagcgccagggtgacgcgtttgattttgaggtggccgccatctttcaggctggcgctgatatcccgcgcatcaagcgtcgggccaaagttctgccagcttgcctcgatatgactcacgtccaccggcaggccggtggcggattcgatttttgccaggatctgcggccgccagctgtccagatgcggcaaggcgagacgcagcccgctcacgagcaacgcgacaatcacgaccagcgttgcccctgtaagcagtaaaatccccggcaatcgcctcacgcgtctctccttgtcagccttaaatctcgcagcgaactgcgtttacatcatgacgacgtcaaactgctcctggttatagagcggctcaatttgcacttttacctgtttgccgacaaagatttccacttctgccagcgcgtgcgactcttcccctttcagggcctccgccaccgcaggggaagcatagaccagaaaacggtctgagtcgtaggcatgatggacacggacaatctcacgcatgatctcgtagcagaccgtctccaccgtctttaccgttccgcgtccatggcaggttggacactcattacacaggacatgttccacgctttcgcgggtccgtttccgggtcatttccaccagaccgagctgcgagaagccgttgatgctggttttcacgcgatctttactcagcgcctgctccagcgagtgcagcacgcgacggcggtgatcttcattattcatatcgataaagtcgatgatgataatgccgcccagattgcgcaggcgaagctggcgcgcaatggcctgcgtcgcttcgatgttggtgttgaagatggtgtcatcaaggttgcgatggccgacaaacgcgccggtgttgatatcaacggtggtcatcgcttcggtctggtcgatgatcaggtaaccgcccgatttcagctccaccttacgctccagcgcgcgctgaatttcgttttcaacatcatacaggtcgaatatcggctggcggcccgtgtaatgctccagcagacccggcatttccgggatgtattcggcggtgaactccagtaaggcttcgtacgtcagacgggagtccacgcggatgcggtcaagctgggcgtcggcgaaatcacgtaatacgcgctgagcgagcgccagctcaccgtacagcctgtagcgggtctggttgcgttttttacgctccatcactttggtccagacgcgcttcaggtaggccgcatccgaggccagatcttcttcgctgatcccttccgccgctgtacggataataaacccgccctgctcgtcgcagtaggcgctgaccacctttttcaggcgctcacgctcgctttcgctctcaatgcgctgtgacacgccgacgtgcgacgcccccggcataaagaccagatagcgtgaaggcagggtgatgtcggtggtcagacgcgcgcctttggtgccaagcggatctttttaccacctgtaccatcagatcctggccctgacgcaccagctcagagatgtcgcgcacggcaaattgcttttgctcttcgcctgccacacattcggtgtgcggcatgatatcggaggcatgtaaaaacgccgccttatcgagcccaatatctacaaaagccgcctgcatacccggcaggacacgactgacacgacctttgtagatattgcctacgattccgcgtcgcgcttcacgctcaatatgaatttcctggagaatgccaccatcaatgtaggccacacgggtttccgatggcgttacgtttaccaacaattcagccgtcataattatcccttccctcacgcagtgagttaaaattgctcagcaactcatacgtttccaccagcggtaagccgactacggcgtgatagctgccatttatcttcctgacaaaacagccacccaacccttgaataccgtatgcacctgctttatccataggttcaccgctggcgatatagccggcgatctcctcgtcggtgaggactctgaacgtcacttccgttaccacaaggcaatccagaacgtactggctatctgccagcgctaccgccgtcatcacctgatgggtttgtccggacatattacgcagcatccgcgccgcatggtctgcgtcgcggggtttctcaagcacctcaccattgagaataacgatggtatccgcacccagcaccggtaagtcacgcggcacgcatgccacgcccgcctgcgctttttcacgcgccagacgagagacatactgctgagcgctttcaccctcagcacgtttttcttcgataccggtaacgatgcgttcgaaggagacacccaactgcgcgagcagttcctggcgacgcggagaaccggaggcaagatacaaagacgtcatagaaaccttttattgcacggcaaactgctggcgaattttacgcatcagcaggaacagccacggccagagcacaccgtttactacactactccagaacacttccggtcggaaagagacgttgatcactaaaaactctgcccagaaaacaacgatatccgcagcgagcgacaacaacatcactaccagcgcctgttgccagagcgcaaggttacgaaagagctggaatttgagtgcgacgagatacgcaataatgctcatggataaggcgcggacgccaagcgtagagccactgataagatccagtatggcacccatcacaaaacctgtgccgacatttactcggtgcggcagggcaaggatccagtagagcaaaatgagcaatacccagtttggccggaaaacaagaatgtcgtccggccagggcataatttgcagcaacagtgcaacgaggaatgagagccagattacccagcgcccctggctacgataactggccactactgccctccacccgagacttgcggcggtgggggcgcatccggcagcggctgcgttaaccccgtcgccggagccggtacgggtgcaggtggtcccatcgcatccggcgcaggcagcacctgcggcatcatctgcatcaggcgttcgttggccacgcgatgcacatcttccggggtcatcgggttagcgccgttacgatcggcgccccacagcagcaacaggtagcgcaaacgctgcaagccggccgttggacgcgcctgaatcacggtgtaggcacgctgagtgtcgagcttcacggaagagacaaccgcaaccgggtagccctcagggaaacgaccgcccagaccggacgtcaccagcacgtcgcccacgcggatatccgtgttggcaggcaggtgttccagttgcagatcgtccgtgcagccattaccggcggcaatcacgcgaatatcgttacgcagcacctgaatcggcagtgcatgggtggcatcgcaaatcagcaacacgcggctggtcagtttggcaaccgccacaacctggcccacgacgcccttatcgctgatgacaggctgaccttcgtatacgccgttcacgctgcctttatcaatcaccacctgatcgctgtacggatcgtttacggtggagatcacctgggtgaccattttctgttcatcctggcgcagcggcgagccgagcagttcgcgcagacgggcgttttcctgcttatattgccccagcatcagcagctcgctatttttcagcagcagttcctggcgtaacgcacggttttcgagttcgagctggtcacgcgatgagagcgtttgcgacacggagtcgagcagttcacggggaccatttgaaataaagtagaaaggactgacggcggtatccatgtacgttcggatttggctgaacgtaccgaggcggctatcggcaataatgaccccgagcgcaaccagaaccgccaggatcaggcgaaactgtagcgacgggccacggctaaaaattggcttcataggctatgcgtattctcgcgtcagagagaaagggtagcgaattgctaccctctcacacccgactactcttcgctaaacaagtcgccgccgtgcatgtcgatcatttccagcgccttgccaccaccacgggcgacgcaagtcagtggatcttctgcaactacgacaggaatacctgtctcttccattaacaggcggtcgaggttacgcagcagcgcaccaccaccggtcagaaccataccgcgctcggagatatcggaagccagctctggcgggcactgttccagcgcaaccatcaccgcgctcacgatgccggtcagcggctcctgcaacgcttccaggatttcgttggagttcagggtgaatccgcgtggcacgccttcagccaggttacgaccgcgaacttcgatctcgcgcacttcatcacccggataggcagaaccgatttcatgcttgatgcgctctgcggttgcttcaccgatcagagagccgtagttacgacgaacgtagttgatgatggcttcgtcgaaacggtcgccgccgatacgcacggaagaggagtagaccacaccgttcagggagataacggccacttcagtggtaccgccaccgatatccaccaccatagaaccggtagcttcagaaaccggcagacccgcaccaattgccgcagccatcggttcttcaatcaggaacacttcacgagcaccggcgccctgagcggattcacggatcgcacgacgttcaacctgggtcgcgccaaccggcacacacaccagcacgcgcgggcttgggcgcatgaagctgttgctgtgaacctgcttgatgaagtgctgaagcatttttttcggtcacgaagaagtcagcaataacgccgtctttcatagggcggatcgcggcgatgttgcccggcgtacggcccagcatctgcttcgcatcatgacctactgcggccacgctttttggcgagccggcacgatcctgacgaatggccacaacggaaggctcattcaatacgatgccttgtccttttacataaataagggtattcgcggtacccaggtcaatggacaggtcattggaaaacatgccacgaaattttttcaacatactaagggataatcctgaaagctggggcggaaaacaaaatccgcttactttaccaaccacacgcagcagcgacaaggcgcaaaaatcgtctgctacggtgaaaattagtgcagcacgtttcctttgttacaaattcatcccctgaatccctcagggctgagtaaacagcagcgtccctcactttcacttgtaacccactaaaggtcgttcactggcttttatgctcgtcttactcaaagctacaggcgcgatattctacgtgaaaacaaagtaaacggcaggtcaaacagagtatctttgcaaatattttttcacattggtgtcaagcggctgagaggcggcaaaaaaatccccctgaccgcccgtcacgccgcgctctgtcaacatctgccattcactacgtgaacgtacgcctgtggcaaatacttgcgtttgcgttcctttgcacgcttccaccaggctttgtaccagcagctggttttccgtgcgtttttcaatattccttaccagacccggatgcagcttcaataattcaacatccagctctttgatccagcgggtgctcaccagcgtcaaacccgcctgggttaccgccacgcgagccccaagcgcattgattaaacgcactaccgggcgcaaccggctgatgtgttgacccacatctgcctctgcaagttcaaaaataatgcgtttgcgttgcgatttttcgcattgcattaacgtgtcacgtaaccagcgctggaaacgcggacggatcagcgattcgacggtcacctgtaaagccagattttcttcaggccagtacgataaaaacggaatgagacgggtgatttgctgacggtcatactcttcggacaatccgaattgcaacaccatgggcagatattccgcggagataacctcttcagtgccatcaaaaatacggcacatcagctcacgatgatgaacatgaccactcttcatgaccgccggtttttgatagatgcgtggtcccccccggctcagcatctgttcaatcagggttcgccagcgcacgttgccgcgccctttctccggcagcgtatcatcatagactgcccagccgttcgccccctgcaatacggcgttacgcgtggccgcttccgcatgttccatcacctgctccgtcgactgaccgccgcgccaggcacagatgcccatatgcaccatatcgtctctgtcgagcattttgctctggggcagcgcatcgacggctttcagcagctggctggcgatactctcggactcctttaaggtgcgatgcggcagcaagacggcaaaatcgctgcggtggtagcgtgccagtaacgcgccggggtagcgcataataaaggtggacagcaggttaatcagcgtaaagaggttctcttccgccacgcgctgaccccaggtatcacggagcagatcgaagtcgggcaggcgaatcatcattaccacgccatgcgtacccaccttttcggggtcatcaagaagggtagccagctgattatcaaagaagagacggttgttgaggcccgttttgttatcctgcgcggcgtaagagcgaatcaatgtgtccatacggctacgctgatcgctggcaaactggatttcggagagcaacacgtccagggcgctactggtgcgtgatggccattcataaaccgatccccgcacctgtggaccccgttcgccattcagtatcctcacggagcgtgtttccagcagttcctggccggaaagttgacgacgctgccagcgaacggcgaggaaaatcagcagtacgataaaggcaacggcgatggttaagggcgcggtggtcataagcgagcgtaaatagttgctcatcggatcctggtacatcagatgaattgtcatacccggatgtttaagtgaattaaccgtgacgtcccgatactgttctaccgtgccggcaggacgatagctgccctggcgggtatggctgaaaacggtctgcttcccctgtttaatgtcgatctgcacgatatccacaggcaccattaactcatccagctcacgcgaaagcgccgggaaggaggttgcaatcaggcgagtgtcgataaccgatgcaaccgattcaacccggttaaccagcttatcctggatggcattgtaaaagctcagcgagcagccgattagcgtgacaaatatggtcagccccgtcagcaaggtgataaaagctgagaacttcgtcgttaatcgcatccttgagattactccgtgggttgaaggggggtgcaagtgagcactaacttgcatttcaaatgcggcatactaccaaacctggcgtatctggcaatttattgcgttaaatcggcactgcgtttcattgagcgagtatagtcatcagaacatattttcccatcatcaaacctagtgaggacccagtatgcaggctttgatcttagaacagcaggacggcaaaaccgttgcctcagtgcaagccatcgaggagagccgcctgccggagggcgacgtgaccgtagatatcgactggtccagcctgaactataaggatgcgctggccattacgggaaaaggtaaaatcatccgaaatttcccgatggtgccaggaatcgactttgcaggccgcgtacataccagtgaagatccacgttttcacgccggacagcaggtgctgctcaccggctggggcgtaggtgaaaaccactggggcggactggcagcgcaggcgcgcgtaaaaggtgactggctggtcccgatgccgaaaggcctggacggtcgtaaggcgatgatcatcggcacggcaggtttcaccgccatgctgtgcgtgatggcgctggaagaggccgggatccgccctgactctggcgaaattgtcgtcaccggcgccagcggcggcgtgggcagcacggccgtcacgctgctgcacaagctggggtatcaggttgctgccgtctcaggccgcgaaagtacgcatgattatctacgtcagctgggcgcaagccgcattctgagccgcgacgaattcgccgagacccgcccgctggaaaaacaggtctgggctggcgcagtagataccgtcggcgacaaagtgctggcgaaggtgctggcgcaaatgaattacggcggctgcgtggcggcctgtggtctggcgggcggttttgccctgccgacgacggtgatgccatttattctgcgtaacgtgcgtcttcagggtgtcgattcggtcatgaccccagccgagcggcgagctgaggcctgggaacgtctggtgcaggatctgccagcctcattctttgaccagagcgccactgagattaccctgagccaggcgccagagttcgccaataaaatcatggacaaccagttccacggtcgtgcgctggttaaaatcgcctaatcttcaaattttcgtgacatattcgcgctaaccctcctcctccgtcatgcttagaaaaacgcctgacggaggatgccatgaaaacccgaaaactgacggaagccgacgtaacgtctgaatctgtctttatgctacagcgccgccagatcctgaaaatgcttggcatcagcgccaccgccctgacgctcacccctgcggcccatgccgatctgctcgactggtttaagggcaacgatcgcccgaaagccccctccggcgcaccgcttaacttcaccaaaccggcgcagtggcagaataaactggcgctgacgccggaagataaagtcaccggctataacaacttctatgagtttggtctcgataaggccgatcctgccgccaacgccgggagcatgaaaaccgatccctggacgctgaagatagatggcgaggtggcaaaaccgctgacgctggatcatcatgacctcaccacccgcttcccacttgaagaacgcatttaccgtatgcgctgtgtggaagcctggtcgatggtggtgccgtgggtaggtttccctttgcataaactgctggcgctggttgagcccaccagcaacgcgaagtatgtttccttccagacgcgctacgccccggacgagatgccaggccagaaggatcggtttatcggcggcgggctggagtatccctacgttgaaggtttacgtctcgacgaagccatgcatccgcttacgctgctcaccgtcggggtttatggcaaagcgctaccgccgcaaaacggggcgcccattcgcctgaccgtaccgtggaaatacggtttcaagggcatcaaatcgatcgtcagcattaagctcacccgtgaacgcccccccaccacctggaacctggcagcgcctgacgagtatggtttttttgccaacgttaacccgcacgttgaccatccgcgctggtcgcaggcgacggaacgttttatcggctccggcggcgcgctggatgttaaacgccagccaacgctgctgtttaacggctatgcggatgaggtggcatccctctaccgtgggctgaatttacgggagaacttctaagtgcgtttaacggcaaagcagataacctggctgaaggtactcctgcatttagcaggattgctcccctttatctggctcttctgggcagccagccagggacagttcagtgccgatccggcgaaagatattcagcattttacgggtcggatggctctgaaatttttgctggcgaccttgctcgtctcaccgctggcgcgctacgctaaacagccattattgatacgcacccgtcggcttttagggctatggtgttttgcctgggcgacgctgcatctcaccagctacgccctgctggaacagggcattaacaacctggcactccttggcagcgaactggtgacgcgtccctatctgacgctgggtatcgtaagctggctggttttactggcgctgacgctgacatccacgcagtatgcacagcgaaaactgggtcgacgctggcaactgctgcacaacttcgtctatcttgtcgcgatcctcgccccgattcattacctgtggtcggtgaagattttatcccctcagccggtcatctacgccctgctggccctggcccttttagcgtggcgttacaagaagttccgccagtggttgcgatagttcacgaaactgtgcgttttcccgcagattatttatcaaccgcgaatctttttcggatagcggttgataatcttccctgataagaccagtatttagctgccaaatgctacgaaatcgttataatgtgcgacttcggttttccggacaggggttttaggcctctgaaagggtgacaattgcgctttgagggtatatgttgttttttacccgaaaatcgcaggagatagcggcacaatggctgacaaattccaaattttagtattgaacggtccgaacctgaacatgctcggcacccgtgagccagagaagtacggcacgctgacattgagcgaaattgttaaccgtctgagtacggaagcagccccgctgaatgtggatttggaccattttcagtcaaacgcggagtacgcaatcatcgaccgtattcatcaggctaaagacactgtggactatatcctgatcaatccggccgcgtttacgcacaccagtgttgctatacgcgacgcactgctcgcggtgagtatcccgtttatcgagatccacctgagtaacgtgcacgcccgagagccgttccgccaccattcctacctgtcagatatcgccgctggcgtgatttgtgggctgggtgcagacggctattcatacgctttacagacagcggtaaaacgcttgtcacaatcacactaaacaagagtacggaacccactcatggatattcgtaagattaaaaaactgatcgagctggttgaagaatcaggcatctccgaactggaaatttctgaaggcgaagagtctgtacgcatcagccgtgcagccccggccgctagcttcccggtaatgcagcaagcttacgctgcgccagtgcagcagcctgcgctctccgcagccgttgcaccagtggcagcagaagcggcacctgcggctgcaacagaaatcagtggtcacatcgtacgttccccaatggttggtactttctaccgcaccccgagcccggacgcgaaggcgttcatcgaagtgggtcagaaagtcaacgtaggcgataccctgtgcatcgttgaagccatgaaaatgatgaaccagatcgaagcagacaaatcaggtactgtgaaagcgatcctggtcgaaagtggtcagccggtagaatttgacgagccgctggtcgtcatcgagtaacgaggcgaacatgctggataaaattgttatcgccaaccgtggcgagattgcactgcgtattcttcgtgcctgtaaagaactgggcatcaagaccgtggccgtgcactcaagcgcggatcgcgatttaaaacacgtattgctggcggatgagacggtctgtatcggtccggctccgtccgtaaaaagctatctgaacatcccggcgatcatcagcgccgccgaaatcactggcgcggtcgcgattcacccgggttatggtttcctctctgagaacgccaactttgctgagcaggttgaacgctctggctttatcttcattggcccgaaagccgacaccattcgcctgatgggtgacaaagtgtctgccatcaccgcgatgaaaaaagccggcgtgccaaccgtaccgggctctgacggcccgctgaccgacgatatggatgctaaccgcgcccatgctaaacgcattggctatccggtgatcatcaaagcgtccggcggcggcnnnnnnnnnnnnnnnnnnnnnnnnnnnnnnnnnnnnnnnnnnnnnnnnnnnnnnnnnnnnnnnnnnnnnnnnnnnnnnnnnnnnnnnnnnnnnnnnnnnnnnnnnnnnnnnnnnnnnnnnnnnnnnnnnnnnnnnnnnnnnnnnnnnnnnnnnnnnnnnnnnnnnnnnnnnnnnnnnnnnnnnnnnnnnnnnnnnnnnnnnnnnnnnnnnnnnnnnnnnnnnnnnnnnnnnnnnnnnnnnnnnnnnnnnnnnnnnnnnnnnnnnnnnnnnnnnnnnnnnnnnnnnnnnnnnnnnnnnnnnnnnnnnnnnnnnnnnnnnnnnnnnnnnnnnnnnnnnnnnnnnnnnnnnnnnnnnnnnnnnnnnnnnnnnnnnnnnnnnnnnnnnnnnnnnnnnnnnnnnnnnnnnnnnnnnnnnnnnnnnnnnnnnnnnnnnnnnnnnnnnnnnnnnnnnnnnnnnnnnnnnnnnnnnnnnnnnnnnnnnnnnnnnnnnnacgcagcgatgctgaactggcgcagtccatctccatgaccaaagcggaagcgaaagcggctttcagcaatgacatggtgtatatggaaaaatacctggaaaacccacgccacatcgaaattcaggtgctggctgacggtcagggcaacgcgatctatctggcagaacgtgactgctccatgcagcgtcgtcaccagaaagtggtcgaagaagcgccagcgccgggcattacgccggaactgcgtcgctacatcggcgagcgttgcgccaaagcgtgtgtcgatatcggctatcgcggggcgggtactttcgagttcctgttcgaaaacggcgagttctacttcatcgagatgaacacccgtattcaggttgaacacccggttaccgaaatgatcaccggcgttgacctgatcaaagaacagctgcgtatcgcagccggtcagccgctgtccatcaaacaggaagaagttgtggttaaaggccatgcggtagagtgccgtatcaacgccgaagacccgaacaccttcctgccaagcccgggtaaaattacgcgtttccacgcgccgggtggctttggtgtgcgctgggagtcccatatctacgccggttacaccgtaccgccgtattatgactcaatgattggtaagctgatctgctacggcgaaaaccgtgacgtggccattgcccgcatgaagaacgcccttcaggagctgatcatcgacgggatcaaaaccaacgttgatctccagatgcgcattatgagcgacgagcacttccagaatggtgggactaacatccactacctggagaaaaaactcggtctgaacgagaagtaagagaccagtgttgctaaaaggccggattatccggccttttttatttctggggatcgctaagccccatcatgtacaatccccgctttcttcatccacaagggacaaaaaatggacaaacgttttgttcaggcccataaagaagcgcgctgggcgctgtggctgacccttctttatctcgccgcgtggttagtaactgcttacttacctgattcggcgattggcattaccggcctcccgcactggtttgaaatggcctgcctgctgctgccgctggtgtttatcctgctgtgctgggcgatggtgaaattcatctatcgcgatatttcactggaggacgatgatgcagcttgaagtcattctgccccttatcgcttacctgttcctggtgtttggcctgtcggtttatgcgatgcgtaaacgttcgaccggcacctttctgaacgagtatttcctcgggagccgctctatgggtggcgtcgtgctggccatgacgctgaccgccacgtacatcagcgccagctcgtttatcggtggccccggcgccgcttataagtacgggctgggctgggtactgctggccatgatccagctgcctgccatctggctctctctgggcatactgggtaaaaagtttgccattctggcccgtcgctacaatgccgtaacgctgaacgatatgctgtttgcccgctatcagagtcgcttgctggtatggctggcaagcctgagtctgctggtggcgtttattggcgcaatgacggtgcagtttatcggcggggcgcgactgctggagacggcagccgggatcccctatgagacgggcctggtcattttcggtgtgagtatcgcgctgtataccgcatttggcgggttccgcgccagcgtactcaacgacacgatgcaggggatggtgatgctcattggcaccctcgttctgctggtgggtatcgtgcatgccgcagggggcctgagccatgcggttgaaaccctggaagcgatcgatccgaaactggtctcaccgcagggggcggatgacatcctctctccaacctttatgacctcgttctgggtactggtgtgctttggcgtgattggcctgccgcataccgccgtgcgctgcatctcatataaagacagcaaagcggtgcaccgcgggatcattatcgggacaattgtggtggcgatcctgatgttcggtatgcacctggcgggtgcgctgggacgcgcggtgatccctgaccttaccgtaccggatctggtcattccaaccctgatggtgaaagtgcttccgccgtttgccgccgggattttcctcgccgcacccatggcggccattatgtcgaccatcaacgctcagttgctgcaaagttccgctacgatcattaaagatctctatctgaatttgcgccctgaacaggtcgaaaatgagcgacgcctcaagcgcatgtcggcggtgattaccctggtgctgggggcgttgctgctgctggccgcgtggcgcccaccggagatgatcatctggttgaacctgctcgcctttggtgggctggaggccgttttcctgtggccgctggtgctggggctgtactgggaacgcgcgaatgccgcgggtgcattaagcggcatgattgtcgggggcgtcctgtatgctgttctcgccacgtttaaaattcagtatctgggcttccatccgatcgtgccttcgttactgttaagtttactggcgtttgtggtgggaaaccgttttggtcgaccggtgccacaaactgtcctgatttctactgacaaataaagagttttgccatgccgtggatccaattaaaactgaacacaaccggcgcgaacgccgaagaactgagtgatgcgctgatggaggccggttcggtctctatcaccttccaggacacgcatgacacgccggtctttgagccgctgccgggcgaaacgcgcctgtggggtgatacggacgttatcggcctgttcgatgcagaaaccgacatgaaagaggtcgtggcgattctggaaaaccatccgctgctgggcgtgggtttcgcgcataaaattgaacagctggaagacaaagactgggaacgcgagtggatggacaacttccatccgatgcagtttggtcagcgtctgtggatctgcccaagctggcgtgaagttcccgataaaaacgccgtcaacgtgatgctggatccgggtctggcgttcggcaccggcacccacccgacaacctccctgtgcctgcaatggctggatggcctggatctggaaggcaaaaccgtgatcgacttcggttgcggatccgggatccttgctatcgcggcgctgaaactgggcgcggcaaaagccatcgggatcgacatcgatccgcaggcgattcaggccagccgtgataacgccgagcgtaatggcgtttccgatcgccttgaactgtatctgcccgatgcacagccagaggcgatgaaagccgatgttgtggtcgcgaatatcctggctggcccgttacgcgagctggcgccgttaatcagcgtgctgccggttgaaggcggtctgctgggcctgtccggtatccttgccagccaggcagacagcgtctgtgaagcctacgccgatctcttcgcgctcgacccggtggtcgagaaagaagagtggtgtcgcatcaccggccgtaaaaaataagcgtttggcgtggtcgtctgaccacgccttttcccttcgtttttttctcccgccttcttcctttcttcgataaaataaccgcacaaatcataatgttaatcattgatttggataataaaattcacaggaagaatatgatgaaacacatttcaggcaaggcagcgctgctggcgctgagcatgatttcggctacggcttacgcatcacactggagttatcagggagaaggcgcaccggaacattggggcgaactggacgaggcgtacaagacgtgtaaaagcggaatgtatcagtcgccggtcaacatagataacacggtcaaagcccacatctctccgctggaaacgcactatatcgacggcccggtcattctgacaaacaacggccatactatccaggcaagtgaaaatgccgatacacgcgacagcatcacgcttgataaacagcgctggacgttacagcagttccatttccatgcgccatccgaaaacacggtgcacggtaaaaaatacgcaatggaaatgcatctggtccataaaaacgctgacggcgaactgacggtcgttgccgttatgttcgatcagggcgcggcaaacactgaactggataaactctggggcgtgatgcctggacaggttgaccagaacgtcacgattaagccaaccctcgatatgaataaattactgcccacggataaaacctactggcgttttagcggctctctgaccacgccaccgtgttcagaaggggtgacatggctggtgctcaagcacccgctgaccgtctctgctgaacagctgcaaaaattcactcacaccatgcaccatgaaaacagccgcccggttcaaccgcttcatggccgtctggttgttgaataagtcgatttttttacgctgatatcctgtgctgaaatgcgacgcagatcgcaaagaagcgccataatctgctgcttatagcagcagattatcccggacaattgattcatttattcagaaatgatgagaagttacgggaaattgtaagcgcccacaaaatgttcatttattcataacacaatgatttaaatagcgaataatcttatccaaaaagaatgactggcgattccttgatctacaacagaggattgttcaaagtttggcctttcatctcgtgcaaaaaatgcgtaatatacgccgccttgcagtcacagtatggtcatttcttaactcatgcgcatcggacaccaccagctcagaaatcgcctgatcgcagccccaatggcaggtattaccgaccggccgttcaggacgctgtgttacgagatgggagcaggcctgaccgtttccgagatgatgtcgtctaacccgcaggtttgggaaagcgataagtcccgcctacggatggtgcacattgatgaaccaggtatccgcaccgtgcaaattgccggaagcgtgcctgaagagatggcagatgccgcgcgtattaacgtggaaagtggcgcccagattattgatatcaatatgggttgcccggccaaaaaggtgaatcgcaagcttgcaggttcagcccttctgcaataccccgaccaggtgaagtcaatcctgacggcggttgtcagcgcagtggacgttcctgttacgttgaagattcgcacgggttggtcgccggaacaccgtaactgcgtagagattgcccaactggccgaagactgtggcattcaggccctgaccattcatggacgcactcgcgcctgtttgttcaacggtgaagctgaatacgacagcattcgggcagttaagcagaaagtttccattccggttatcgcgaatggcgacattactgacccgcttaaagccagagctgtgctcgactatacgggagctgatgctctgatgataggacgtgccgctcagggaagaccctggatctttcgggaaatccagcattatctggacactggggagctgcttgccccactgcctctggcagaggttaagcgcttgctttgttcgcatgttcgggaactgcatgaccactacggccaggcaaaagggtaccgaattgcgcgtaaacacgtctcctggtatctccaggagcacgctccaaatgaccagtttcggcgcacattcaacgccattgaggatgccagcgaacagctggaggcgttggaggcatacttcgaaaatcttgcgtaatgaaataaagagctgacagaactatgttcgaacaacgcgtaaattctgacgtactgaccgtttctaccgttaactctcaggatcaggtgactcaaaagcccctgcgtgactcggttaaacaggcactgaagaactattttgctcaactgaacggtcaggatgttaatgacctgtatgagctggtactggctgaagttgaacagccactgttggacatggtgatgcaatacacccgtggtaatcaaacccgcgctgccctgatgatgggcatcaaccgtggtaccctgcgtaagaaactgaaaaaatacggcatgaactaatttcgattagctaactgcttgtttaaaaaggcgctcttcggcatggggaagcgccttttttatcgtccggacgggcaaccgtcaatgctttgtaaaccttctctttccccacttttcaacgcccgcttttcgtgtatatttccagcaacttacaggctctcttttcacggaatgacacatgattcgtaaatactggtggctggtcgtttttgctgtctctgttttcatttttgatgcgctgctgatgcagtggattgaactgatgagcaccgaaaccgataaatgtcgcaatatgaattccgtgaacccgcttaaactggtcaactgctcagagctggactaaccgcttccatcctgtccccccctgttatcactcaataaaaacagggatttaaatcacttttcgtcatttcctgacgatgataatgtctgtgccctttccaaccgctcttgcttaacgtctcacaacgagtgaacagaccatgctggttagccaatacaaccaaatcctcgtagtcatctcctttgttgttgccattcttgccgcctataccgcgctgaatatggctgcgcgcgttgccggaagccagggcatcgctgcacgcgtctggctggcaggtggcggtgtttcgatggggattggcgtgtgggcgatgcatttcatcggtatgctggcgatggatctttccatgagcatgagttacaacgcggtcctgaccgtgctttcgatggttatcgccatcagctcgtcaatgtttgccctgtggctcgttagcggcgagcagctacgtttgcgccggctgctgcctggcgccgtcgtgatgggaacgggcattgttgccatgcactacactggtatggcagccctggaggtcacaccgggtattgtctgggataaaaagtgggtggctatctccgtggtcattgcccttgccgcttcactggccgctctttggctgacgttccgtttacgtcaggaagccgcacgaatggcgttgatgcggctgggggcggcgatcaccatgggcatcgctatcgctggcatgcattacgccggcatggaagcagcacaatttccaatgttgacgatggtccaccatcatggcattaacgggagctggctggcgatactggttagcgtggtcgcgctcgctattctggggattacgctgctggtgtcgatgttcgatgcccgccttcaggctcgtacctcgctgctggcctcatcactggcagaagctaatcgtgaactcgcacagctggcgttacatgatacgctgacgcgattacccaatcgtattctgcttgaggatcgcctcgatcaggccatcagcaaggccgatcgcgaaggaagccctttcgcgctgatgtttatggatctcgacggctttaaaaccgtcaacgatgcctatggtcatgatgtcggtgacaagcttctggttgcggtgactcagcgtttgctgttgcagctgaaaggtcagtatacgctggcgcgtatcggtggggatgaattcgtcctgctggccgaaaccgccactccggatgatgctgcctcactggcaaattcactggtgcgcgtcattgatagcccgttccatctcgatccttacgaactgatggtcaccctgagcattggcattgcgctctatccacacgatggcaaaaccgatcgtgaactgatgtttaacgctgatgctgcgatgtaccacacaaaacatatgggtcgtaacggctatcacttcttccagccgtcaatgaatacgctggcgcagacgcatcttcagctgatgaatgatctgtggcaagccatcgaccgtaatgagttacgcctgctttatcaacctaaattccacgctcctgccgggccagtcctcgggttcgaagcgctgttacgctggcagcatcccaaacaggggttactctcccctgacctgtttctaccgctggcagagaaaacggggctgattattccgattggaaactgggtaatcgacgaggcctgccgccagctgcgtgaatggcatcttcagggccacacggactggtcaatggcggtgaatctttctacattgcagttcgaacagccgtcgctggttaaaacagttctcgattgtctgacgcgccatagcgtaccgcccggcatgttgatcctggaggtgaccgaaaccacggcaatgaacaatccggacgaaagcgtgcgtgtcctgacagcgctgacggatgcgggagtaaaagcctcgatagacgattttggcaccggttactcaagccttctgtatcttaagcgactccccgcctgcgagttgaaaatcgatcgtgcttttgtgaaagagttaagtggtgagagcgaagatgcgacgattgtctcggcgattgtcgccctggcaaaaacgctgaatctgaaggtcgtggcggaaggggtcgaaaccgcagcgcagcaaacctttctgacagaactgggatgcaatacgctacagggttacctgctgggcaaaccgattaccgcgcaagctattatggaacagtgccagcacggggagatgtcgccaccccggacgcggtcatgaggctgtatcgtaaaccactggcgccactcgggtgatatttagtgtcgccagaatattatccaccagcgccggtgcttgtttgtacagattaaaattgttgctatccattaaccagtttttaatgacaccgctaaaaaaggcgtggaaaacaatcagcgccagttcaatattggtttgcgaagagataacgttacgagcaatgcatcgctttagcgtcttgcgaagataatcatcgtttaaaccgatccgctttcgtatttcacattctgaaatcacatcgtcatgaaattcacacttatgatacaaaatttgtaaaagcgcatattgccgcggctcgctcgcaatatattgcagtgcgacaataaattgttcacgaagcattaacaaagggtcgtcattttcggaaagtattaacctgtcacgaatcatctcacgcatcggcaattgctgatcccatattgcattaaatatttccgctttactcgagaaatgccagtaaaccgccccgcgagtgagttgagcagcatcggcgatgtcggtaagcgtggtgctggacacgccacgcgtcgcgaatagcccgatagcggcttcaatcagctgctggcgggtcttttgagcctcttctttctttttgcgcgccataacctgctactcattactcataagattgatacgttatcaaaggatattgccgtggtcgtgtagtcaaagtattaaccaaaacccgtgttaattttgcacaaaaaaagtcaattcatttaatttataattcacgtgaataaatcgaatacataaaattcataaaatatatgaatagcattcaccgaaaacatttcgttgattatcctgacagaaaaagaataccgaatgcactgtgtcagattccgatttttacttttaaaagctccatcagcacttataaattaaaaaacattaaacaccctcattattatacgcggctacatttctattttttgcctcacaccctttcaccgattcatggcatatatcggctcaagggtagtttaaggaacagtaatgacgaatcacttcagatgcttacccttatccggtttcattgtctgtgccgcgctgctcaccgggtgcgatgggcaagaaaacccacagcagcatgcgcaagctcctcaggtcagtgttcatattgttaaaagcgcgccactggccgtaacgacagaattgcccggcagaactgacgcgtatcgtgttgcggaggttcgtcctcaggtaagtggtatcattctgcaccgtaattttaccgaaggcagcgacgttaaagcgggtgaatccctttatcaaatcgatccggccacctatcaggcagcctacgacaatgcgaaaggtgaactggtaaaagcacaggcggcggcgaatatcgcccatctgacggtgaaacgttacgttccgctggttggtacgcaatatgtgagcaagcaggagtacgatcaggcggtggcaactgcccagcaggcggatgcgagcgtggttgccgcgaaggctggcgttgaaagcgcgcggatcaacctggcctatacgaaagtcacatccccaatcaacgggcgtataggtaaatccagcgtcaccgaaggggcgttagtcactaatggccaggcaactgcactggcgacggttcagcaactcgatcccatttatgtcgatgtgacgcaatccagcagcgattttatgcgcctgaagcagcagacgagcctgcaaaagggagacaccagcagcgtcgagttgctgatggaaaatggccagccttatccgctgaaaggaacgctccagttctctgatgtcacggtagatgaaagtaccggctcaatcacccttcgcgccctcttccctaacccacagcatatgctgttaccgggtatgtttgtccgtgcgcgcatcgatgaaggtacgcaacctgatgccatactggttccccagcagggagtaacccgtacaccacgcggagatgccaccgtgcttgtggtaaatgagaaaaaccaggtggaatcacgcactgtcgttgcaccgcaggcgattggcgatcgctggctgatcacggaaggcctcaaaaacggcgaccgcgtcattatcagcggcctgcaaaaagttcgccctggcgtcaccgtcgtggctattcctgataccgcagcgactccagccagttaaggaataacgacatggctaatttctttattcaacggcctgttttcgcctgggtactcgccatcattctgatgattgcgggcgggctggccattttaaaactaccggtcgcgcaatatccgaccattgcgccgccggcggttgcggtgacagcaacctacccgggcgctgatgcccagacggtacaggacaccgtcactcaggttatcgaacagaacatgaacggtatcgataatttgatgtacatgtcgtccaccagtgattccgctggtaacgtcaccattacgctgacgttcgagtcgggtacagatcctgatattgcgcaggtgcaggttcagaacaaactccagctcgccatgccgctgctgccacaagaagtgcagcagcaggggatcggcgtggagaaatccagcagcagcttcctgctggttgcaggctttgtgtcggacaataaaaacctcacgcaggatgatatctccgactatgtcgcttctaatgtaaaagatgcgatcagccgtacttccggcgtcggtgacgtgcagctgttcggtgcccagtatgcaatgcgcatctggctggacagcaacgcgatgaacaaatatcagctcacgccgctggatatcattaaccagctaaaaacgcagaacgaccagattgctgcgggccagttgggcggaacaccgtccgtacctgggcagcaactgaacgcctcaattattgctcaaacgcgtctgaaatcgccggaggagtttggtcgtgtgacgctgaaggtgaaccaggacggttcaatggtccacctgaaagatgtggcccgcattgagctgggtggcgaaaactacaatatggtcaccaaaatcaatggccaggcagcaacggggctggggatcaagctggcgactggcgcaaacgcgctggataccgctgccgccatcaagagtaaactggcgcagttgcagcccttcttccctcagggcctgaaagtcgtgtatccgtacgacaccacacctttcgtgaagatctcaatccatgaagtggtgaagacgctgtttgaagcgattgttctcgtgttcctggtgatgtacttgttcctgcaaaacctgcgggcaacgcttattccgactatcgccgtgcccgtggtgttactgggcacctttgcggtactggctgcgttcgggttctccattaacaccctgacgatgttcgggatggtattggcgataggtctgctcgtcgatgacgccatcgtggtggtcgagaacgtagaacgcgtcatggttgaggacaagctgccgccaaaagaggcgacgcagaagtcgatggagcaaatccagggcgccctggtgggcattgccatggtgctttcggcggtatttattccgatggcattttttggtggttcaaccggggctatctatcgccagttctcgctgaccattgtctccgcgatggccttgtcggtactggtggcgttgatattaacgcctgctctttgtgcaacgctgctcaaaccggtttccagcgaacatcatgaaaagaaaggtggtttcttcggctggtttaacgcgctctttgataaaagtgtggagcattacagcaacagcgtgagcggcattttacgtaaaaccggccgctatctgctggtttacgtcatcatcgtcggcggcatggcagttctgttcctgcgcctgccttcctccttcctgccggaagaggatcagggggtgtttatgacgatggttcagttgccggcaggggcgacgcaaatgcgtactcagcaggtactcgatcaggttcaggattattacctgacgaaagagaaagcgaacgttgaatcggtctttaccgtaaacgggtttagctttagcggacagggacagaactccggtatcgctttcgtcagcctgaagccatgggaagaacgtccgggcaaggaaaacggcgttgaggcgattgtcagccgcgcgacgaaagcgttcagccagatcaaagacggtcttgtatttccgtttaacctgcctgccattattgaactgggtaccgcaacaggctttgactttgaactgattgaccaggcaaacctggggcatacgcagttaacccaggcgcgtaaccagctgctgggcatggtgagagaacatcctgacttactggttcgcgtgcgtcctaatggactggaagatacgccacagttcaagctggacgtcgatcaggagaaggcacaggcgctgggtgtgagcgtgtctgacgtcaatcagacgatttcaacagcgctgggtggcacctatgtgaacgactttatcgatcacggacgggtgaaaaaagtttatgtccaggctgatgctcgcttccgtatgctacccggagacattaacggcctgtatgtgcgtagcgctaacggcgaaatggtgcctttctctgcctttagcagctctcactgggtgtacggttcaccgcgtctggaacgttacaatgggatgccatcaatggagatcctcggtgagtctgcccctggcaaaagtaccggtgaggcaatggcgttgatggaaagccttgcgtcaaaactgccttccggcatcggctacgactggacggggatgtcttatcaggaacgactttccgggaatcaggctccggcgctgtacgccatctcactgattgtggtgttcctgtgtctggcggccctctatgaaagttggtcaattcccttctcggtcatgctggttgtgccgctgggggtgatcggcgcgcttctggctgcatcaatgcgagggctgaacaatgacgtttacttccaggttggtctgcttacgacaattggtttatcagccaagaacgccatactgatcgttgagttcgccaaggatctcatggataaagaaggcaaagggattatcgaagccacgcttgaagcctcgcgtatgcgtctgcgtcctatcctgatgacttccctggcattcatccttggtgttatccctctggtcatcagcagcggtgctggtagtggggcacaaaatgcggtcgggacgggcgtgatgggcgggatgctgtcagccaccctgttggccattttctttgttcctgttttctttgtggttgtccggagacggtttacaaagcacaaggattaatgaaaaccataaaggcacctctggtgccttttttatttcctgaaaacaatgtaaaaacacttcccctcttcacatttcctccattaataatcagtgcccgcgcttttttcttcataatttttacaatccacacaaattgagattattccccgtgctgcatggtattagtgcggtggtaaaataatcatcagttcgttaattgctgtatcggctctttagcgaataagcgatcatattgaggtaacatcatgaaaagattcctttccgttgcacttctcgctgcgctgcttgctggttgcgcgcacgactctccatgtgtaccggtatacgacgatcaggggcgactggttcacaccaatacctgtatgaagggcactacccaggataactgggaaacagcaggtgcgattgctggtggcgccgcggcaatcgctggcctgacactcggtattgtcgccctgactaaataaggcttctaaaagcgcggccatcgccgcgcttttatttttccctgatataaggaacgtatattcctcatcacgaatagcatcagatattaattaaattcaatacgctaccttactccccgctataccccatacctgtacataacatttaattgatttaacgctgctgcgagccagcataatgcattccacaacttcagtttcagtagggtaaaacgctttaatacgtccgtaaggtattaatggcgacagcaggaatatcgaatgagggaattggtttggctggagcgataacgcaaaaaggccatcctttcggatggcctttctacttgtttgatgtctggcagttccctactctcacatggggagaccccacactaccatcggcgctacggcgtttcacttctgagttcggcatggggtcaggtgggaccaccgcgctaaagccgccagacaaattcttttacttcttgccgaactttaacctaagtataaagtggtgctgatacccagagtcgaactggggacctcacccttaccaagggtgcgctctaccaactgagccatatcagcacgctaaatttatcggtgaggccgaaggcaaagataacaaagcaattaacatagataaacttcgacaaatagctcttaatatacatgaagatcttaagcgcgatgaagttatggcaccagccaagtcagtattgtttggaaatccttatcgtttagagcctgtcgaaagcagaaagaaaccatttaccgataaatgtatcgcttcagcacaagccagctcaacagcactaatatttacaccagacctgtttttaattgctaaataccttaaagaaaataaaaacaaaacttttgcaaagaaatgcaggcagtgaatatttaaaactgtaggcagggttgtattcccacagttacctaaaaagaagagcgacatagcgagcccttcagcagagattcaatcatattaatttataaagtggtatcatttgatgccactttatttgaatcctaggatatatcaataaaaacactatcaaaaggatgttgataaaatatagatactaaaaattccaagcatcggctaggtagatatatccatatattgaaaaaaccgctgcgaaagtatctccagcaacggtctctttaacatcacaacctttgtaagtaatcatttaaataacgatatgattttcttattgttattggcttggaaaaacatttctacctttttattcaccaatccttcagatgcttttatgtctatttcggcatccatatcatctaaagtaaggtaacttttatcatctctacttaatattaaataactcatgctattgggcttaacaataacctctgccgaatcaaaaaatatcttccccccgatgaccgtaccgttcgcatgatacttttcaaaaatttcttgctttgctttctgctgagtttgctcatcggcaaaatcacttatatttgatatctcaccccaaaaggcatgacttgaatttactttataatttgccttaaatgccattggagaacttagtttatttactagcctaaatttatattgaattttaccgttcaatctcctggcatcaaccaattcgattggatactctttttttgcaatgtcgtaattctttattactatatcgttaccaaatggggaaatcagaaaaccataatttttgtaatcactgtaaaacagagaattgtgtatatatccgattgttttttcaggcgaatcgccgctgcttatcaagtaacttaatacgcctagtgttgtcgtaaatagagcaatggtgaacgttaagaccccagcgctgggaggaactacatcttgtgtcagatatactcgcccattggcatcttctgattttatccgcggccttattttcttctctaatttcctcgcaccttcaaccaatatcaccatcgatattttttctgaaggaagaactctatctataagtatttcaccattttcatttttataatcataggtggatgataaaacactacaacttaacccattaggcatctttataattacattttttctttatcttttccgttgttatatatactggagttcatagtaaatgcattatcggcaattgatgtgttttcaattgaattccaacatgacaaataaagctgcctctttctgaacagagacagtaatttattcaaaacaagagcgacaaaaaaggaaattataaccttaaatgtattcgacaaaatatcttgcattttattactcattttttcttcagcaaattattctgatttttttatttcggctcaaaattagctctgagccgatagataggcattacttgttttttatttcgcacatttctatatagtgatcttctgctgcatcgacaattttagccagactttgcctttccgggccatcgcgaccatccaacccctcaccttcagggcgattaaacttaacaaaatcatatacttttttaactagcgtccttgcaagttcagctcgcgcgactggattatcattggcttgagcattcagccacttctcaatttcgttatgcatttctgatcctttcgaaaggtaatgggatattatggcttatacatgtcaatttctgccacatagcggtttagggttctctgacacccaaaatttacctatgcattgggtggtctttttatatcatactattgaaactatttcatttaccggacatttagccacaatatgagattcaacgccttgaatgtatcttgcatgagcgctcaagaaagcggcgtcaatatctctcagagttctcaagctgggtggctgtaagacgaatggtaagatggcgtcggatcctgagccggttttttcgttcaatgagattaaactccgttccgtatgccttcatcagtctcatcctttgaaagtagtgagcactgtggttagactgtagcgcggacatgtctatttggtcagagacggacatctcaatttagctactacaacattggtgcgtataacaaagattatgttaaattcaatagtaaaatcattataaatcaatatcttaaatatcgaacaagcccctttcttcctcaaacctcactgtggtaactttaaaaacaatgtccgttcctgagtttgtgatgccttaaagccatggtgaagataaaagtttttggcttcttcagtcagtgcatgaaccataatcgcacggactccaatattctcagctacacggtaacagcgcagaactgcatcatgcagtaaatcggccccgagcccttggccacggtatgaaacatcaactgccaggcgagcaagtatgattacgggaattggatctggcatattgcgcctgaggcttcccattgcttccacgtggttaacgctgccggtggccagagagtaaaaaccgacaacctgtttagtgtctcttttacaaacgacgaacgttcgtgctgcaccaagagcttggttttttaatcccctctgtttaagccagtcatcaagtactgcctcaccactgacgaactctgctagttgatgggagctggataatggttctggtgctgttacacgtcccactgaggtttccttgccagaagtttatcaatagccgcctcatccgaaaccggtgcatcgagcatatcgataaactctgcatactgctcatcgttaaaattaaatacgcgacgatcgaggatcacattctccgcagcctgacatgccatttccaggatgaagtccgtgcgtgatttatggagaatctctgctgcagcatcaataagtgctctttgagattctttagctctaaggttgagctgaacatctgatttcatgagtgcgctccttgtatagcgattgctttacaagcatatcatatggattctgtatagcaaaagctatacggttttttaagtgcagtgaacatacgaaagagtcaacttgcaactattaggtaaagctcttcctctaaattattttccttgctctggcctaccaaatcaaacccaacgccctgaatttactgcgtgcgatgcttgctagcagtctcatccggacaattagcatgaaaactatggattgttatctggtctaacatctggaaaagttactgatnnnnnnnnnnnnnnnnnnnnnnnnnnnnnnnnnnnnnnnnnnnnnnnnnnnnnnnnnnnnnnnnnnnnnnnnnnnnnnnnnnnnnnnnnnnnnnnnnnnnnnnnnnnnnnnnnnnnnnnnnnnnnnnnnnnnnnnnnnnnnnnnnnnnnnnnnnnnnnnnnnnnnnnnnnnnnnnnnnnnnnnnnnnnnnnnnnnnnnnnnnnnnnnnnnnnnnnnnnnnnnnnnnnnnnnnnnnnnnnnnnnnnnnnnnnnnnnnnnnnnnnnnnnnnnnnnnnnnnnnnnnnnnnnnnnnnnnnnnnnnnnnnnnnnnnnnnnnnnnnnnnnnnnnnnnnnnnnnnnnnnnnnnnnnnnnnnnnnnnnnnnnnnnnnnnnnnnnnnnnnnnnnnnnnnnnnnnnnnnnnnnnnnnnnnnnnnnnnnnnnnnnnnnnnnnnnnnnnnnnnnnnnnnnnnnnnnnnnnnnnnnnnnnnnnnnnnnnnnnnnnnnnnnnnnnnnnnnnnnnnnnnnnnnnnnnnnnnnnnnnnnnnnnnnnnnnnnnnnnnnnnnnnnnnnnnnnnnnnnnnnnnnnnnnnnnnnnnnnnnnnnnnnnnnnnnnnnnnnnnnnnnnnnnnnnnnnnnnnnnnnnnnnnnnnnnnnnnnnnnnnnnnnnnnnnnnnnnnnnnnnnnnnnnnnnnnnnnnnnnnnnnnnnnnnnnnnnnnnnnnnnnnnnnnnnnnnnnnnnnnnnnnnnnnnnnnnnnnnnnnnnnnnnnnnnnnnnnnnnnnnnnnnnnnnnnnnnnnnnnnnnnnnnnnnnnnnnnnnnnnnnnnnnnnnnnnnnnnnnnnnnnnnnnnnnnnnnnnnnnnnnnnnnnnnnnnnnnnnnnnnnnnnnnnnnnnnnnnnnnnnntctcccgtcttgcaaaagaactcagtgcaaaggacgcaaaaggcaatgtcattcctgaaacggaggtgacggtgtcacgcctttcacggcttattgaggaacaggtacggtttggcgttctgggcctcgcagaagaacgcgcctgggatcgtgaatcccgcacctggttgccaacgtatgtctatataacccccgtgggattccagatgctgggcgtcgatatggacaagctgtttaaagagcaggagaagaagctccgtcagagcgccgagcgtgagcagctgatccgggaaggagtgatgagcgaacatgatgatgttcaggcccactctgcgcggaaatgctggtctggccgtaagcgtcgggaggcactcgtttaccgccgcaaaaaaggcgcggagcgtaaacgtgccaacaatctgattaagctgccggcagatgaacgactccatgcaatgtctgaatggatttaccgcaccctcccgcctgacgaagcgtactggtgcacatctgagcgcctgaaggctctggccatccagcatctttaccagctggatctggcgctttctcccccggactagtcacagacgacacaacagtcttcttgtttacgggcccctcactggggcttttcgtgctggtttttttcggccactctgctcatttttcaaccttcactccgttctccttccggtcaccatgacgttctgcttgtcgttatggcccccagtggccactgtctcttttttttacacagaaatccgcaaacgaataagtgaagtaacccggaaacgaataaaagacattccgcaaaacagtcttacttcaccgtttttatctctctgttcatttcattccagagtagatctttgtctgcagtcactctgtggataacgaaaaatgccttcgcatgcagcggcctcacggcctcgcgctcagaacaaaatcaaaagtacctcccgtcgcaagcgccgggcccctttctggccagaacccggcaccgcatacatacctaacccctgctaaaccgacgccgccccggcccaaagggccggaacaccctcgctttaagagggatgttgtaactagaaatcagagccgctgcagtttgagtcgcggtaagctcactgtacacgctcgtaagcgcctcacggcgctaacgcggagatacagcccgtcagcggcctgtggcctcgacgtgctcactccgaccgcgcacatcacaatcaggcgtggcggttaacggatatggctttgcagggtaagggatgggacaggcagaacctttcaaaccgcagcggcttacgccggtcacggcgcccatcaacattctcgccctgtctggcctcagctggcgcctccatgccgcgatgcggcatcggtgagttctgcaggactgcatgcccattttttgttgtcaaaaatcgtttcgggaatatgctttcagaaacagataagcgaggcgataaaatggacacgttgcttttacccggccagaatccccgtgcctgggcggaaaccatgatcaacctggaggcccggaagctggtgaatacggccaacacggtggcggccatgcaccttcaggatggttttatccggattcaatttgtggatgagatcagagcattcatcatgacccagtttgaagccgcgcgccgggcaaaaacggatgatgactgtatggcctgtctgcgggccttacgggctgaaaatgccagcctgctggagcagtcccgatcgctcaaaaccggctatgcaaaactctatgccgaggtgaaggttgtccgggacgagaacaaaattgtgggctacatcatttctgcggtcgacgtcgtggtggccggtgcggccatttttggtgggatcgtcatgatgtcttcgatgacgccggtgggcgtggtggccggcgcggtgattgtcgtaaatggattcaatacgatttcacgggaagccgcgcacaacttcctcggagataagcagacggaaggtattttcgctgacggctcgatggagatcgctgaatttctgggattcagccggcagcagggtctgggaacctataagacggtcacacttttcagtgaagtctacggtgcgtatggcctgaggctgaaacccgaagcacaacggctgtggtactggaccaggcccgattttttcaggaaagtatccagcacgccacgtcccgcgatggcgcttaaaattgcgggatggggggttaaagccaaagtggcgcttgatttgctgactattgagccttccgggaaatagttttctgcaggcggaaagctttccagcccagcgcaggtggaaaggtcacccaggcaatgataaggacaacaagggagctcatgcccccggaaagaatgtgtgtccggctgccggcgatgagggtgaccagcataaccagaaccagcgcgaccgtgatccatgccgacacccggaagcgccgtgagagcgcttcgatgagatgctgcatggtgcctccgcctgctgcaagtcggccctgtaagttatccacttcgctcttgctgaaacctgcctcaagcaggtctttctcactgatagccattacgtcctccctaatcaggcgaaagtatactgtatcagaacaataatccccaggtgaccagcgtaagcatagtaaaagaaattacgcggcatgaaacgctggcggccttccggacagatttccctgcagaaagaaaccaccaccagggggaataccagagtaggcagcgtggccagtaataatgtttctgcgggcaggttcgggatatgcgacaacccgtttaaacaaatcagtgacagcacgacgccagcgaccgccattcgcttccctccgggcatgccactgcctgataaggttgccatactgatggccagcgtaattcctgccagcccgtagctttccggctccagtggccaaatcattagggccaggatcagatatcccgcaagcattcctttccggccgtgccggtactgcagggcaagcagctgcgtgacgccggcaaatacgaacagaatgttcagggcccaccagggctggtgatgcaggaaggccaggctgaacaccggctgcgtaatgattgcccagatccacaaccgattggctctcttctgaagtcgttccggggtgcgctgtacgttcatcgcccatataagcgtgaacagggggaaggccatccggccaagcgcatacatcatcggccaggctggcgacagaaacaccgtattggtgtggtcgataatcatggccagaagtgcgaggagcttgaccatatcgagagcagcgggactgagctggcacgcgttccggatactgggaagaacgttgggtactgaatgattcatgctgtatattcccctggcgacacgcggttaacagccagccctgaacataatgccagaatgccctgccagtttgcgatgtgaccctgacctttagtttctccagaatcttgcgcaccgcaaattctgatttatcacgcagcacgcgcattgcacctgccacatccttattctgaatacagatatttaaaatatgaaaatcgttcataacactcccttccttactacatatatcggcaaatatattgatatatttagtttaaggagtgcaattgcttattattttaccatattttgcatggaaagatttttataattataaaacatgctgctgcaaaataacttaatatacatctcaacctaaaaccgattattcctggctgatatccgaagattgagcaggatgaagctttgcataatcttctcgaagcgattttgccgcgggtttccaggctttcgcccactcatcatccattcttcctacaccaacaatcttcagtgcgacagcatagggggtgcgcccttgctgttttgaaagccacaggatgtgatcatcaattctgtcatcaggtatatcgtcgataatggaatggataacatcgagatcctctggcagccacggctttccagtacggggaaacaccaggtccggttcgcgcggtttctttaccttctcgtttttagcgatctgtctggcttctttctccgcagaaatgagccgtagtcgctccttaagcccacccagtgtggcaaccgttttaattaaattttctcgctgttcgcgagtaatgctttgctcatcgcagatcaggtcgttcagggtatcgatgagtgtatctacccgattttctgttaatttcatttccagttctcgcttaaggctacaactcagcattctattagatatctatttgatttcgcatccctgttgatctcataaatgcagtccatagtctcgatcactgagcatggaagcctgatgctaaaatgatatactgatgtaagaacaaatcttacataatgaaacggaggggttatggcccgtacgatgacggtggacgtgggtgatgagctgcgcgaatttatcgattccctggttaaggctggtgattaccgtacccagagcgaggtcatgcgagatgcgctgcgtcttctgcgagagaagcaggctgaatcccgccttcaggaactgcgcgatctgctggccgaaggcatcagcagcggcgaggcgaaaccatggaacaaggatgcattcctgaataatgtcagggccagggtggcaaatgaaagagattgagctgacacccaaagcagaagaagatctggaagcaatctggggctacagcttccgacagttcgggattgttcaggcggatgcgtatatcagccgtatagcagcggtttttaacgtgctggccatgcatgacatcggcacgcatcgcgctgagctgggagacaatatctgctcgttgccggtggaacagcacatgatctattttgtgccatcgcattcggtggttacggtcatacgtattctcagccagtctcaggatacggcacggcatgaaccctggatataatcgggcaagaaactttaaatacataaaaatcaattacttagttcgtgtaatctatcttatgttaaatttagtccgtcgttcatttagttcataacaggccgcagactacgattaatcatnnnnnnnnnnnnnnnnnnnnnnnnnnnnnnnnnnnnnnnnnnnnnnnnnnnnnnnnnnnnnnnnnnnnnnnnnnnnnnnnnnnnnnnnnnnnnnnnnnnnnnnnnnnnnnnnnnnnnnnnnnnnnnnnnnnnnnnnnnnnnnnnnnnnnnnnnnnnnnnnnnnnnnnnnnnnnnnnnnnnnnnnnnnnnnnnnnnnnnnnnnnnnnnnnnnnnnnnnnnnnnnnnnnnnnnnnnnnnnnnnnnnnnnnnnnnnnnnnnnnnnnnnnnnnnnnnnnnnnnnnnnnnnnnnnnnnnnnnnnnnnnnnnnnnnnnnnnnnnnnnnnnnnnnnnnnnnnnnnnnnnnnnnnnnnnnnnnnnnnnnnnnnnnnnnnnnnnnnnnnnnnnnaacgctcccgatcgggagcgtaagccagtgacttcggcgtcaaatgagggtctgacaagtggagctgcgggttaattctgggtgatctggctgcgatgcttttcagcctgctgctgatgaataacggaagattgaccattattcgccttctcatgcataacagcggctttctcatgctcgttcatttcggaaaatgattttgctgtttcgttagaagctgctggcttggatttcatcatttttttatgcatttcagccatgtcctgatgggcagcagaattgccgttttgcatcatgtcatgggacattgcggcctgatcgtgactgctcatatccatcattgtcatgctgtctccctgaactgcgcttttttcagcagatgactgcatctgatgggcaggagcctgtgcattatttacctggtcatgcatgttcattgtctctgcagccatggcggatgaagcgacagccataatggcaacaaatgatacgagaatctttttcatggttgggtctccggtgtttacatacccaaacaatcaatggcttataacagagaaagcagttgatctcagggcgggttaatcatcactccaggaaccaggtgattgtgttatcacgctgctcctgatttatgaataattataaaaaaccgcctctgtttatcgcgtgactgaatgatgacaattttgtcaccttccaggtttctcctgaacaacgggattaatccattaacaggcgcactttgaacacaatttcacgcccctgctgttctgctgacagctcgccgccgtgagcatgaatgatcgaccttgtaattgataatcccagccccgcgccttccgtgttgtggacccttgatgaatctgcgcgatagaagcggtcaaacaaacgttcaagattagcgggaaccgggccagacatcatattcgtaatcatcacgttcacacagtcactgtcacgctcaaggcgtatcgctgtacaggtgttatcgggagaatacttgattgcattggaaagcaggttactgaaagcacgtcgcagcatatcgctgtctccggcaataacgccctctccttcaaccgtgattgtctttcctgtttcgtctgccaggggctcgaacaactcacgtaattcattcagttcggctgccagatccacatcatgtttatccagccgcagcagaccatgctctgaacgtgccagaaaaagcatgtcactggtcattcgtgacaaccttttcagttcttccaggttagcgaataaaatttcgcggtaatgcgaaacatccctttccttagccagtgcaaactgcgtctgcatcatcagattactgactggtgtgcgcagctcatgcgcgatgtcagacgagaaatctgacagtttccggaatgccccctccaggcgatcaaacatattattgaactcctgcatggtctcagagatttccggcggagccagatcgggatttagacgctgatccaggctgtgtacagtcatggaggaagccagactggtcatttcccgtaacggtttcagaccaatacgtgtggtcagccagcccagaaaaacagaaataaagaccagaccgatattgaaccagaacagccaggtactgagtttgtccatcaacagggtgtgatacccagtatccgtggcaaccgtaatgatgacatgtttgcttttaccctgttccggcgtcacggcaacccgccgcgagatactgcggtacacggtgttattttcttccgtctggatcatatagtcgagaatatcacccgacttattaagcaggaccgctggaacaacagaatttttggcatagagttcaacaattttttcattttccatgttttttatagaaatgaataaaccattgtgccctaccatcgcatcgtttattttttctgataatgacttaatatccgttttgttccggaacgtctctgttttaagaaactcttcggtgagctgaagtttacctgtcagaaaatcgcggtcctgattatcgaaatagccattaagggtgctaatcaggataaaacttgataaccaccataccgtaagcatcaccgcagaaaaaatcaggctcaggcgtgtggtcagggaaattttgaacctcactcttctctgatctccaggacatatccggcaccgcgaacggtatggatcagttttggctcaaagtcatcatcaattttacttctcagacgtctcacggcgacatcaatcacattcgtatcactgtcaaaattcatgttccagaccagggacgagataagactcctgggtaacacttctccggtgcgttgcagcagcaactcaagcagaacgtattctttaccggtgagatggatcttcttccccgaaccggatcacggtccggcgcaccatatcaacggtcatatcggcgatggtgcagactgttgcggcctgcgagcgtgcccggcgcagtagggttcttacacgtgcaaccagctccgtaaaatcaaagggcttaatcaggtagtcatctgcgccaagctccagtcctttcactttgtcccgcacgttgtcctttgcggttaaaaacaggaccggttcttcgtgcccggactccctcagtgcgctgatgatttgccacccgtcgaggaaaggcagcatcacgtccagtattatcaaatcatactgtcccttcgacgcggccccgagaccatcgcggccattattaaagagatcggcctgatagccttcctcaaccagtccctgctgcaggtaacgacctgttttttgttcgtcttcaacgattaaaatacgctgcatggtcaactcgctgatatgaaagtaaaaatctcacgcatgagctttggctgtcccctagctgacctgagacggagcaagcattccgagccacgctacggcgcccagaatgataatcgcaacaacgaattctgtcaggatgctgtttcgcatcagggcaacgctgcgatcataattcccttccctgaccataacttcaagccggggacccaggtgaaaccggtttgctgcagccagaagaagcatcagaacaaacagagccgtcttggcaagcaatatcctcccccaggaactgttgaacaagggcgttaagttaccctcagcaatatacagatagttgaccagcgcactcaggatcagggctacaacaatcaccgttcctgccgtggcaaattttgccagggagtcagatatcacaatgacgctctgtgcattatgctcgtttctgcgcatcagcaggatagcaaatgcaaccagagcacctgtccaggcacctgcagcgccgagatgggtcagatcgctcagtaaatggagatagtaatgcagaccgtcatgcataacggcgtgtcctccccaggcaagtgtagccagcgccacgcccccactcatcgtcatcagcaggcaggacaatactctcttattagtgtaaaggaacaaagcaccgagtgtggtaaacagggcacagagcctgacaatccagctaatacccacatcagtttcttctatcaccatctcgataacatggatggataattctctgaggtcagttactccactcatggcattagataccaggagcatattaatgccagtaagaatgatgcctgtaacaacagcaaaggttataaacgacctgaaattagtcaggttataggtttcatgtctgacaccacttattccatatatctgaaaaaatggcaatccaaatattaccatcaaatccagataaagaagaaaacgaataacaatcataatcaggtcgttcataatattacttcactgtaaaggtgtaattaccggtaatagggtgcgtatctgaagaaaccgcgcgccagtcaacacgataagtgccagcgggtaaaggctctcgcggaataatgaccatcgatttagggtcagcgcctggcgccacttttgccgcgaccggcatcggagaatgtgatgacatgcctttcatacccgtnnnnnnnnnnnnnnnnnnnnnnnnnnnnnnnnnnnnnnnnnnnnnnnnnnnnnnnnnnnnnnnnnnnnnnnnnnnnnnnnnnnnnnnnnnnnnnnnnnnnnnnnnnnnnnnnnnnnnnnnnnnnnnnnnnnnnnnnnnnnnnnnnnnnnnnnnnnnnnnnnnnnnnnnnnnnnnnnnnnnnnnnnnnnnnnnnnnnnnnnnnnnnnnnnnnnnnnnnnnnnnnnnnnnnnnnnnnnnnnnnnnnnnnnnnnnnnnnnnnnnnnnnnnnnnnnnnnnnnnnnnnnnnnnnnnnnnnnnnnnnnnnnnnnnnnnnnnnnnnnnnnnnnnnnnnnnnnnnnnnnnnnnnnnnnnnnnnnnnnnnnnttcatacccgtcatcgttaattttgcacctgagaatttcacggtcagattttccgagaaattaagctgaatcttttccggggccgctacggctgaatcagcctgtggcacagagctttttaattccggatgggccatagcagagaaagcaacgcccataacgaggccacctgtaagaatggctttatttaaaatcgacattttatttacctgtttagttgagtgttttatatcagtgcgttaaaaccagattctggctcccgccaggaatactacctgatggtctttctcaccttctcttttcgccatatcggacgttttcccgtaaagttgattccaggaaacgcctatatagggtgcaaactcacggcgtatttcatagcgcagccggagccccagctctgtgtcagtcagtcccctgccgcgaccccgcgattcatcatcctgactgtagaaattcacctcataggatggctggagtatgagccggttagtcagtaaaacgtcgtattctcctcccagacgaagggctgcttttccgccattactgacaaaacccgtaatttcagactcaaaattatagagtgccagcccctgaaaaccgacagcagcccaggtccgggcagaagcaggtctgaaatcctgcctgacacccgcaaccaaatcccaccatgggccaaccgcatgtccccagagtaactgcgcttcagccgcctccgtttccccattgcttcgttcaccttcactctttagccaaatccgatctgtgtcgcctccaatccagctgttaacactccagctgaaattgttggtgttatccgaccgttgccattccagttgatccagcagaaccagataattaatcgcactgtcgtgaatcgcatgcccctgtaaattgccgaatgcagccttccggtcggcataggtaacaggcggaattggcgttctgctctcagttacaatgggctccattgacgtcatctcagtgaaattctcatctgctggcatctgcatggcagacatgtcgtgcccggcgtggggatctgcagagacggagcccgccgcaatagaaagctgtgaggtaaacaaaccggcgaccagaacaggtatggccttcaaatttctcttcattcgcatcattcctccacccggacttcacgaaacattcccatttccatgtgatagagcaaatggcagtgatacgcccagcggccaagcgcatctgctgtcactctgtaactgcgttttgtaccagggggaacatctattgtgtgtttacgaaccatgaaattaccgttttcatcttccagatcgctccacataccatgcaggtgaatggggtgagtcatcatggtatcgttgatcagcgtgatcctgagccgctcaccgtatttcagcagcaccggtgcggcatctgaaaacttgattccgttaaatgaccaggcaaacttttccatgtggccggttaaatgcagttctatggtacggccaggttcacgtccgtcaggatcctcaaagcggcttttcaaatccgcgtacgtgagaacctttcttccgttatttcgaagaccaatacccggatcatttaatttcggagagacgctcatcgcctgcatatcaaccagtgggttatccgtttctgacgcaggatgactttgcatacccggcattccggccatccgggaatgatccataccggccatgctgctgtgatccatgggcgcggaggatgtcccgctatccggaaggtcagcaccgtccatagacatcatctctccgctgttatccatgcctcccatctggctgtggtccattcctgccatatcatgtcccattccccccatacccatatcttccatggtcaacagaggacggggatcgagggggggaacggcagcacttaacccctctctcgtggccagtgtccctcgagcgtaaccggtcctgtccatggattgtgcgaagatggtataggcctcaccctgaggctccacaatgacatcataggtttcggcaacggcaatcctgaattcgtcaacggtaaccgggtttacatactggccatctgcagccacgaccgtcattttcagcccggggatacggatatcgaaataggtcattgccgagccgttgataaaccgtaagcgtatcttttcaccgggacggaacagtccggtccagtttttcagcggggcctgcccgttcatgagataggtgtaggtgtagccactgacatccgcgaggtcagtcggattcattttcatttcagcccacattttccgatcggcaatggtggctgacagccccctggtattcacgtcgcggaaaaaagagccaacggttggtttattgaaattgtagtaatccgactgtttttttaattttttcagcaggctgtgaggattttcatcggtccagtcagacaacatgaccacatgctcacgatcgtaagcaaacggttctggctccctggcatcgatgataatggcaccgtataccccctcctgttcctgcagaccggaatggctgtggtaccagtaagtcccgttctgcttaaccttaaaggtgtaaacgtaggtatcatcaggctctatgcccataaaactcagccccggaacaccatccatattggccggaagaataatgccgtgccagtgaatggacgtctgttcattaagacggtttttgaccttcagggtaatggtgtcaccttctttccagcgaagaacgggccccggcaggcctccattgattgttttggcctgacgctcactgcccgtgatattgacggccgtttcaccaatggtcaggtcaaactgagtaccctgcagggatgcggcaactggcaggctcagactggaacgcgcattgaaactccatacgccaagacttccggctacgccagagagggttaaccccttcaggaaagttcgtcgagacgttttcaacagcatgcgcattcccttatttaaagtatggttactgacagaattcgagaaccgatttaaattaaattactggttcatccacttacaatgaaatgaatctagcacaccttaagaaacaaattcattacaatcgtgtaatgtacatagctgtattacatttacgtcatcttccccacaggttgattatttttatatatgatcataaggacatcttttatgtacctcagaaggtaattacacatgaatatattaatcacgaccactgcgtttacagctttattttgtggggcagcttttgctcagtccagtgatattgcccatgaagcacatcgatttgttaataatgcctcagccgtcagtcatgtgaattcctcgacgcatgaaaatttaccggacagggttaataaaaacaacacgccctcattctctgaaatgaatgaacatgaaagggccattgttgctcattcatttatgaacaacagcgcgtcctatgcgcatcagaaaatgattgaggaacataaaaaaatgctgtccggcagtgatgcaaattcaaagacctcgtcttcttcttttaacgaactgaatgccggagaaaaagccgctctcgtgcatgagcaggtcaataatgccggtgcggaagcacatcagacgcaggcaagaaagcttcgcgggctgtattcgaccaggtaactgcaggcgggttagtgcttagcgtcaggtgcgcagcagggctttactgacgggttacgtagcaggacatgagccccatattgctctgccgtaacctgtttcagtcccgttaatcatcaccgtcgggctggtcatacagttcccagagcttcaggagcaaacgggaaacaagatatgttacaaaaatgacgaccatcaacggtgctcccgattaactgacagatgacacgcctcctgaaaacccctagcatacgccgcagtgttcatgctaacggcgaattccagtaaatgtattctaccgatgtcgtaaaagaaaatgcctacctttcagccacccgctcggggctggaatcgaacgagatcgctactcttcagcgctccttgccttcccggtttaatctgcggcatttgaaaaaaaatgaatcattaaaactcgtactgcaaaagaaagcgggaaaatcacgtgtcgtggcctataaatttacgtccggttcatttaattacacggcgtatcgtatatcagataaaaagttctataacctttccgatacttccgggaaaggcagtctcgattatccgttaccggccacagcaagactcagttcgcctttcaatcctgcaagacttaacccggtatcgggaaaagtgagtccccataatggcattgattattccatgcccatgaacacgaaaatagtcagcgtcatcgacggaaaaatcacccgggccgaatacaacagtaccatgggatattttgttgaagtaacgggaaaagccggtgttaaaactcgctatctccacctcaataaaatactcgttactaaaggggccagggttacccggggagacgctattgcgttatccggtaacagcggacgttcatccggtcctcatctgcattacgagctggtcatcaataacaatcctgttaactcactggcgttccggacggcggcacccgctgataacaaactcgaacagcatgcctttgcgcatgccagagactacgaacgatacctggactgataacgggaccgcgacgcggtcccgtctgccggattaattttttttatcgttttcacttccgtgatgttgatgatctccatgccccccgtgaccgtggaaaagatgcatgagcggacaaagcagcagtaacagatatggccagtagcctgccacatgtgaccagtgttcgcgcaggagagcaaatgccgcaatcgcggcgacagcaataagcgcataggtggtacttttcataccggactccttctgttcgtaactgacccttcactcagggttatttcccgagcctgacacttttcagacgcaacgcattcacaatgacgctgacggaggaaagagccatggccgccgccgcaataactggcgacagcagtattccatacacaggataaagcagacctgcagccacaggcacgccaagtgcgttgtagataaatgcaaaaaacagattctgtcggatatttttcatggtgatttctgacagatgacgggccctgttcagtatcatcaagtcgcctttgagaagggtgactccggcactttcaattgccacatctgtacccgttcccatggctatacccacgtcagccgctgccagcgccggggcatcattcacaccgtctccggccatcgcaaccacatggccagacgctttcagtcgggttatcactgcttttttgccatccggcagaatcccggcttcaacctcatctattcccagtttccgtgcgactgcttcagcggtaagctggttatccccggtgagcataacgatgcggatccccgcctgacgcaaagctttaagcgcatccggcgtggttgctttcacgggatccgagatagctatcaggcctgcaaggtgcccgtctgtggccacatagataacggtagcgccttccatccgcaacgtatccgcaacggccttttgattatcaataacgatactgttttcctgcatagccagttcattaccaataacaacccgttgaccttcgacatcgcctgagacacctttacccgacggcgcattgaaatgagtgactgcgggtattgcgatccccttttcctgtgctgctttaactactgccatacccagcggatgctgcgagcctttttccactgcggccgttacacgcaaaagagatgtttccccacccggattgagactgataatccctgtcaccgtcggcgaaccttccgtgagcgtgcctgttttgtcgacaaccagcgtgtccactttttcaagacgctcaagggcttcggcattcttgattaacaccccggcctgggctcctttgcccacccccaccattatcgacatcggcgtggccagccccagcgcgcagggacaggcaataatcaggaccgacacagccgcaatgagaccgtgcgccatcctgggctcgggcccccagacagaccagatcatgaaagcaacaaccgcgataagtatcaccagaggaacaaaccagcctgaaacgctgtcagccattctctggatgggggcccgcgaacgctgtgcatcagcgaccatctgaacaattcgtgagagcatcgtttcatcacnnnnnnnnnnnnnnnnnnnnnnnnnnnnnnnnnnnnnnnnnnnnnnnnnnnnnnnnnnnnnnnnnnnnnnnnnnnnnnnnnnnnnnnnnnnnnnnnnnnnnnnnnnnnnnnnnnnnnnnnnnnnnnnnnnnnnnnnnnnnnnnnnnnnnnnnnnnnnnnnnnnnnnnnnnnnnnnnnnnnnnnnnnnnnnnnnnnnnnnnnnnnnnnnnnnnnnnnnnnnnnnnnnnnnnnnnnnnnnnnnnnnnnnnnnnnnnnnnnnnnnnnnnnnnnnnnnnnnnnnnnnnnnnnnnnnnnnnnnnnnnnnnnnnnnnnnnnnnnnnnnnnnnnnnnnnnnnnnnnnnacaattcgtgagagcatcgtttcatcaccgactttctctgcacggatgataagactacctgtctgattaatggtccccccgatgacagggtcaccctccgttttggtaacaggcatagattccccagtcaccatcgattcatcaacggttgttttgccttcgaccacgataccgtcgaccggaatactctctccaggtctgatgcggagcttatcgccaggcaggacatcttccgcattaatatccgtttcatgaccgtcttgatccagccgcctggcggttttgggggcaaggttaagaagcgcagtaatggcacctgaggtttgttcccttgcccgcaattcaaggacctgtcccagcagaacaagcaccgtaataactgctgcggcttcaaaataaacggccaccaggccatccatgtttctgaacgatgcaggaaaccaggaggggaagacggttgcaatgacgctgtaaacccaggctacgccggtccccattgcaacaagggtaaacatattcagggagcggttacgtaacgacattacggcccgggcgaagaatggccagccacaccacaacacgacaggggaggccagaagcagctgcagccatgtgttgtactgtggcggtactgtattcctcaagtcgggaaacagatgagatcccatttcgagtaccagaaccggaaacgccagcaacaaccccagccagaagcgtcttgtcatgtcgtgaagttcatcactcggccccgtggatgccgtagctacgagcggctccagtgccattccacagacaggacagcttccgggaccactgcggcgtatctccgggtgcatcggacatgtccacacaccttcagaattctctttttccgcctggtggtgaggctgttttatctgatcagggctgacttcgtgatgatcgtggtgatggtgatgggaatgttcactggcatcttcggtaagataacgatcgggatgggctgtaaatttactctcacagctggcggagcagaaataaagttgatggtcctggtatcgaatgctgctgtgcgccctgtcgggcaggatggccatcccgcacacgggatctctcaccttatgcaatacgtggccctcgtccggggataatgtctgctcagaagcagtctggttgttgtgttgcactgcattgtcatttttcacagtaactctccttatgcataccgaagcatcttctgtcttcagggtatgtcatggatgcgattaccacgaatatcgccggcacaggagtgcctgctaccggcgtcccgttatcagccgttccgctgactattcgattcgctggaagacttttttacttccatccggtgagaatgcgataacatcgtaagcctcttttcgggctcccatctccattcccgggcttcctgctggcataccgggggtggcgagaccgtatatacccgaaccagactgcattgccttatgtatcgttgtcgcaggcacatggccttcaatgatcaaattaccggcaaccgcggtatgacaacttcgtagtcctgcaggaatagcatgcttttctttcagggctgacagcgcctgatcattcatgacgtgagttcgtacttcaaacccgtctttttccatcgccttgccccacagggaacaacagccacagttttcagatttgtacatatcaatcactttttcactcgccattgcgggcagtgaaaggccgagagccagggccaccaggaccacttttttcatactcacctctgtatattatcgatataacccctgacgtcaggatgaatcagtacagaagggcacccacagaggatgcccttacagggttatgacacgctttttttatgtctgcgcagccagattaatttgtaggcggcaggaattatgaacagggacagcagcggagccgtgatcatcccaccaatcatgggtgccgcgatacggctcatgacttctgaacctgcaccggttccccagagtattggcagcagacccgcaatgatcaccgccacggtcatggctttcggccggacacgcagcacggcaccatgatagagggcttcatcaagaccttccggtgtgaacgtctctttacgggacaattccgggtgcacttcaatggcatgacgcagatacatcagcatgaccacgccaaactctgctgccaccccggccagagcgataaaccccgttccggttgcgacagacatatggaagccctgccagtacaggaaccatatcccgccaaccagggcgaacggcaggctcatcaggatcagcagggcttcatcaacccggcggaatgccagatacaacaggatgaagatgatcatcaccgtcatcggcaccatcagcttcagtttcttgttggcatgctcaagcagttcaaactgtccggagaatgacacgctggtacccggtctcagtttcactttctgactgatcgccgttttaatgtcattaaccaccgataccatatccctgccgcgcgcgtcaatgtaaatccagctggctggacgggcattttccgttttcagcatagtcggcccggaaacgaccttaatatccgcaacatcgcccagcgtgatctgctgcttcatcggggtcaggatcggcatctgtttcagggcctgcgggctgttccggtaatcctgcggatagcggatattaatcgggtaccgggccacgccttcaaccgtttcccctaccgtcgcgccgccgatggctgatgagatgaacagctgcacatcgcccaccgtcattccgtagcgggaggctttttcccggttgatatccacatcaatgtagcgcccgccttccagtcgctctgcgagagcagacactacgccgggtacggttttggcgaccgcttcgatactctgcgccgttgcatcgatatcggacagaaccgttccggacaccttgatacctatcgggcttttgatcccggttgagagcatatcaatacggttacggattggcggcacccagaggtttgccagccccggtaaacggacggtcctgtcgagttcttcaataatcttgtcaatcgtcatgcctggacgccactgatcctcaggtttgagctggatcgtggtttcaaccatttcgagcggtgcggaatccgtggcggtctctgctttaccggtcttgccaaatacagaggccacttcaggaacgcttttgattaacttgtccgtcgtctgcaggagcgctgcagcttcagccggagagacacccggcagggtcgacggcatatacaacaggtcgccctcgttaatcttcggcagaaactcaccgcccacctggctcagcggccagataacggtgaaaatggacaaggccgcaaccagcagggttgtttttggccagtggagaacccgcaacagcaatggatgatacgctttgatcagtacccggttcagggggttactggtctctgcaggaattttcccccggatccagaatcccatcagaatcggaatgacgatgatggccagcgcggccgcgcccgccatggagtacgttttcgtgaatgccagcgggccaaacagacgtccttcctgaccttccagggtaaagataggaataaaggacagggtgatgatcagcaggctgataaacagtgcgggtcccacttcaacggaggcatcggtaatcaccttccagcgggtggcgttgtcaatctgctcacccggatgctgatgatcccactcctcaagccgcttatgcgcattctcaatcatcacaatggcggcatccaccatcgcaccgacggcaatcgctatccctcccagcgacatgatattggcgttcagtccctggaagtgcatgacgataaaggcgatacacagaccaagcggcagagagataatcgccaccagggcagaacgtacgtgccacaggaacagggcacagacgatggccaccacgataaactcttccagaagtttggaactgaggttatcaatcgcccggtcgatgagctggctgcgatcgtaggtggtcacgatttcaacgccttccggcaggctggccttcagcgtctcaagtttatccctcactgccgtgataacgtcgcgtgcatttttacccgaccgcaggatcaccacgccgccagcgacttcgccctggccgttcagctcggcaataccacgccgcatttcaggcccggtctgcacgcgggcaacatcccgcagataaaccggcacgccgttctcgcctgttttcaggacgatgttattaaaatcatcaatgctctgaagataaccgctggcacggaccatatactcagcttcggccatttcaacggatgagccaccggcctcctggttagacgattcaagggcctgtttcacttcgggcaggctgataccatactgagacagttttaccggattgacctgaatctggtactgtttcaccacgccgccaaccgaagcgacctcagccacgttcgggatggttttcagctcaaatttcaggaaccagtcctgcagagaacgcagttctgaaaggtcgtgttttccgctgcgatcgacaagggcatattcaaatatccagcccacccccgtggcgtccggaccgatttcagaactcacaccggcgggcagttttccctgtacctggttcaggtactccagcacgcgggaacgggcccagtacagatcggtgccgtcttcaaaaatgacatacacatacgaatcaccgaactgtgaaaaaccacgcacggtttttgcgccaggcacggacagcatggtggtggtaagtggataggtgacctggttttctacaatctgcggggcctggccgggatagctggttttgataatgacctgcacatctgacaggtcaggcaaggcatcgacaggcgtgttaataatcgtccatgtgccccagatgctgagaaacagggcccccatcatgaccaggaaacggttggcgacagagcgccggataatccattcaatcatcgtcgtctcctcagtgccctgaatgcatatttacaggctggtcagacattgctggcatactgctttctgttttttcagggtggcgcatacgttccagtgcgcccgtaatattggcttcagagtcaatgaggaacaggccactgaccaccacggtatcgccttcattcaggccggagccgatgccggactgttgctgtgactcatgcagaacgtggatctgtttcggcacaaacttgccttcatcatcaacagtaatcacgcgctgttctttgccggtatcgataacggcctggcttggtatcagcagcatctcctggcttctggtattcagtttcagataggcattcatgcccggcttgagaaactcatccttattagaaacctggagacggacctgaagcgtacgggttgtctgatccacgctgggaagaatattccatttttcgacatggaatgttttatccggataagccggtaccgaaatttcaaactgcgacgtatctttcagcagataggcgatagattctggcactgcagcgctgatccagaccgggtccattccctgaatctgagccaccaccttatctttcgaaatattcatgccggtgcgcaggtcaaatgcagtaatgacaccatcaataggtgctttaatggtaaaacgggtctgaatgctccgggtagaacgcagtctctgaatatcctcttccggcatacctgccaggcgaagccgttccagaacgcctttaatttgcgtggaagtaccaccggtgctggataacagaaggaattcactctgtgcttccacccagtccggaatggtaatatcgataagtggcgtccccttcttcacatgatcgccaatcgtcatggggtagactttttcgacaaacccgtcagaacgcgcctgcacaataacaaactgatactcgttatagctgacattagccgggattgtctgagaataattcagcattcctcgcgtgactttttgcgtttttaatcccagattctgaacctgggttgggtcgatacggatcccgccactgcttttatcgccactgtcatcagcatattttggcaccaggtccatatccataaagggcgattttccgggtttatcaaatttggtatccggtttcattgggtcataccagaaaagcacctttcgttccggtgccttttgttctgttttttctgtcttttgtgctgagtttacatactgccaggcagtaaccgatatcagcccccctgctatgaggctgctgataattattgcagcataatttatctttaaagaagccatacaattttccgctaaaaaatcaaaacacctggcatatgcgcctgacggttaactcacacatatacctatgtgaatgtacaggcgcacaggatgtaatcgctccggacagccaatcaggactgcgtcacgttaatgcttttaagtaaagaaatattaccctgctgaataaacgagaaatcgacatggttgccggttttcagggcattgatagcgtcgtctgcattaacaaaagtgaagcgcatggtcattgcaggccagcccaccgcagggattgcttcgtgcgaaatggtgatctttttactatttatatcaatttctttaacgacaccggtgcccttgataacctgctgtaccgaagcatcactggcagtattcatatcgccatgctgatgtgtttcagcatgaagaccggcagaaaacatgacagagaaggcaccaaataaaacggctttaagtgaattacgcattttaaatttcctgattaatgaaataaatttactctacccaaccgccacccagtgcggtaaacagattaatttcgttaacctgccgggaataggtaagatcgagaatggtttgctgcgtagcgaagagagaacgctctgcatccagcacttcaatgtaactgacagcaccactggaatataatcctctggcacgctggagagttatctgaagtgaatcaagataacgctgctgtgactcaagttgctggctaaggctgtcgcgcagcgcaagcgtgtcggaaacatccttaaaggctgactgaattttttgttcgtaattaaccaccgactgttgctggcgaatttcagccagcttcagattggctttattcctgccagcattaaatataggaatttcaattttagggataaaattccacattccacttcctgacgtaaacaggctggacagctccgtactgcttgcggaaagaccactggtcagggtaattgaggggaaaaaggccgctcgcgctgcgccaatattggcatcagccgctttcagctgatattccgcttccataatatccggtcgctgcagcaaaatttgtgaagacagatttggtggcaattttactggggctatctccccgcctttcatccctttttctggcggcagtgcacggtacgttcccagcaccagttgcagggcattgtttgcctgagccagatcgccttctcgtttggctatctcagcgcgggtactttcgatttgtcccctggcctgttcaagcgccagcacattcgtactcccggtcacgagctgttgctcaacgaaagcataggactgttcgtaatttttcagcgtttcccgcgcgatacggagttgttcatacgccagttgctggctgaaatagctttgtgaaacgctggagaccagcaggatatgtacagcccgacgggcttcttcgctggcaaagtagttctggcgatcagcgtcactcatgttcttaagtttgccgaaaaaatcgagctcataactgaactccagacctgcgtcgtacttctgtgtggtcggcttgtcacctttcagaccaccgctgtaggtgatcccggatgaggcattcagctggggataacgatctgcatccgtgacgttgaactgggcccgggcctcttcaaccttcagtgcagccattctcaaatcacggttattagtcagggcttcagtaatcagccgggtgacctggggatcgacaaaaaagttacgccagcccgtatcctgatagccattcaccgctggcgtcaggctgttacgggacagtgaaaactgctggggtaccggtgctgccggacgctgatattcaggcgccagagagacacaaccagccagaatgaagattgtgctgatgctgagtagttttaatttgaacatattgcttctcgtccaggcagacctggtaaatggttcaaatgaagtccagagtattaccagggttactttacagaatgcactctgtttgtcgggtgacagaataatgacaatgttgtcatttttacggtaattcgttgattacgatcgtgtgcgcaatagaatgacattagcagccagacggggagcaagatgaaaatattgatcgtcgaagacgaaattaaaacaggtgaatatctcagcaaagggcttacagaggcagggttcgtggtggatcacgctgataatggtcttaccggatatcatctcgccatgacagccgagtatgatttagtcattctggacatcatgctgcctgatgtgaacggctgggatatcatccgcatgctgcgcactgccggaaagggtatgccggtcttactactgacggccctcggcacgatcgaacacagggtcaaaggactggaactgggagcggacgattatctggttaaacccttcgcgtttgccgaactgctcgcccgggtaaggaccctactgaggcggggaaacacgctgatcacggaaagtcagtttaaggtggctgacctctcggttgatctcgtctccagaaaagtcagtcgcgccggaaaccgcattgtgctcaccagtaaagagttcagcctgctggaatttttcattcgccatcagggtgaagtgctaccccgctccctgattgcctctcaggtctgggacatgaattttgacagcgacactaacgcgattgatgtcgccgtaaagcgacttcgcgcgaaaatagacaacgattacgggacaaagctgatccagacagtccggggcgtgggctacatgctggaggtcccggatgcatagcaaaccgtccagacgcccgttctcgctcgcgctgcggctgaccttttttatcagcctgtccacgatactggcttttatcgccttcacctggtttatgctgcattcggttgaaaatcattttgccgagcaggatgtcagcgatctgcagcaaatcagtaccacactgaatcgtataatgcagtccccggcggatccggatgaaaaaaaaataagcaaaataaaggagtcgattgccagctaccgcaacgttgcctttttgctcctcaaccccaggggggaggtgctcttcagttcagcgcagggggcagcactacgcccggccgtgaattcagcagattttaacgagcacagccgcgcacgggatgtctttctctggacggtggaagagcctgcggatccgatgcacgccgaatccggaatgaaaatggacacctaccggattatcgcctcctctggtcaggcgatttttcagggtaaacagcagaactatgtcatgctgactggcctctccataaatttccatctccactatctcgatgcgctgaaaaagaatctgattgcgattgccgtcgtgataagcctgctgattgttctgatcattcgtatcgccgtccggcagggacatctgccccttcgtaatgtcagcacggccattaaaaacatcacttccgagaatcttgatgcgcggctggaaccgacacgcgttcccattgagctggagcagctggttatctctttcaatcatatgattggaaagattgaggatgtctttacccgccaggccaatttctctgccgatatcgcccacgagatcagaacgcccatcaccaatctggtgacgcagactgagatcgcactgagtcaggaccggacgcagaaggagctcgaggatgtcctctactccagtcttgaagagtataaccggatgaccaaaatggtcagcgacatgctgtttctggcccaggcggacaataaccagctgatacctgacagggtcagatttgatctcagagcggaagtcctgaaagtcttcgaatttttcgaagcctgggccgaagaacgcaatatcacgctcaggtttaacgggatgccctgtctggttgagggcgatccacaaatgttcagaagagcaatcaataacctgctgtccaatgccctgcgttataccccggagggacaggccatcaccgtcgccatcaaagaacaggaaaatgtttttgacctggtgattgaaaatccgggaaaaccaatccctgaggagcatttatcaaggctgtttgaccgtttttatcgggtggatccgtccaggcaacgaaaaggagaaggcagcggcatcggtcttgctatcgtgaagtccattgtggaagcacatcacggaagagtaaatgtggaatcggatatacgttcgacacgtttcattttatccgtacccagaccggagaaaatgaatccggcacctcaacactgagaataaagatgtaaatgacaaagatgtcattagcctgtcatgcagcaaacagaagccattcgatataattagtgcaacttatcaggaaggctggactgcttcatatatacccagggtttaaatacgccaggagctgagtatccagccatctgccggagaaataagtactgcggaacctgtttcagttatggaactgaaaaaaccggttgtacttccccggacatcactaattcagaaatggagagttatcatgaaaaatatcgtcttagctgctgttatgggtcttggcttaatctcgtcggcgtgggcctcagggactattgatattcacgaacaagttaataatgcacaggcaccagctcatcagatccagtcagcttcagctacaaacgcaataaaggggtctacaccacaaatggccagtatgaatcagcatgaacaggccgttattgctcatgaaaccatgacgaacggatcggcggatgggcaccagaaaatggtggaaagtcatcagaagatgatgggaaataactccgtttcccctaccgcgccgtcaacgtcgtatgccgcgatggatgagcatgaaagagcggcggtagcccatgaattcatgaataacggtcagtctggcccacatcaggccatggccgaagcgcatcgccgcatgatcaatgcaggctgaatgcgacggtagtatccgtgctgttaccttttccttgatagattgtccttaaacgacgttgctacatttttgcccccgtcagggggcttttttatctgactcagctacaattaaccggtacctgcctgaaaggaattattatatgaaaatcagaaactcgctttttgttataataatgttatcgctgccagccgtttccgctgaaccctcggacatgaaaatgtcagatatgtcctcatcggcatcgtcgcaggaatatatgaagggcatgaaagacatgcatgacaaaatgatggccgccgttaatgagtccgatcccgacaaggcctttgcaaaaggtatggttgcacaccataaaggggcaattgccatggcggaaaccgagctcaaatacggaaaagatcccgaaatgagaaagcttgcgcaggacatcataaaagcgcagaaaggtgaaatcnnnnnnnnnnnnnnnnnnnnnnnnnnnnnnnnnnnnnnnnnnnnnnnnnnnnnnnnnnnnnnnnnnnnnnnnnnnnnnnnnnnnnnnnnnnnnnnnnnnnnnnnnnnnnnnnnnnnnnnnnnnnnnnnnnnnnnnnnnnnnnnnnnnnnnnnnnnnnnnnnnnnnnnnnnnnnnnnnnnnnnnnnnnnnnnnnnnnnnnnnnnnnnnnnnnnnnnnnnnnnnnnnnnnnnnnnnnnnnnnnnnnnnnnnnnnnnnnnnnnacgggagcctgttaaacgtcaaataattaaaacccgattaatttcgggtttttatattttgtcctcagatcctgtgttgtggggcgcaatatatgcacctgccttatttttttctgagttaattccttctgcttcgaaaaaaatagccatcgcttccggaagcgtagatttccctaagtcattagggcagacaatgcccgtcattacatcatcgttaatgatttctgtggtgtttctgtcgcccctgaaatttttattttttacttttctgagccacatatacagtcctgtatgcagtgaagcattgttaccggaacccttctcaggctggtatacaggcgtctcaggtcaggacgggcggcagacgctttttatgacccttgttttctgcggagcgggcctgagaacatttattgctttatggtgaacaaagtcattatcggatgctgaaaatggaataatcctccaatcgcaataatctacctactttcttgacctatctacaacaatccctctcttcttatgccaggatccgaaaaccgtcaaagccggaagcaatgcaactgcctacctgattcgtttagctctgttcgtatacgattcagggaatgaaatttaaacaggatgcatcacttgatgaaacatgtaagataaatcttatctacgatatttaaggaaaggcacagcgtggcgacttatcgggcttactacggtcaggacagagatcgtgaatattttgaacgcatatttcagtcagcaaacatcaattttatcattggctcaggagcatcactgcctgcaatcagcgtgctaggtgatattgaaagcgaacttgaggctctgatacgcgccggaaaggatgatgaatacttcagtaagtctgagtcttttttggacaatgtatggaaggcaaacaatgtcctccttaagcgaagcaggcccgcagaggtagtccttcctgctttaattgatgatgtcgtatcgacacaaaacaattacgcgaagttcatgcgtgcattagaaatgcttctaacgaggcggcgcactggattgctaccgcggcgcatcaacctctttacgactaactatgatttattcattgaggatgcggcggttaaaaataacaacgtcattctgaatgatggtttccgtcaacgcgccgatatttacaaccggacggtattcgatgccaaatgtttttatcagaccatacacgcaaccgggaacctttataattacagcgtggaactacctacggtgaatctcatcaagttgcatggatccctttcctggcatagctataataaggaaatctactattccattaaggatatgaagccagttgcgttcaatacaccaaaggagaagcaggactgggttatgtctcatcaactggttctgccgcgcaaggataaatttcgtgaaaccttacttgaaaacgtgtattacgacctgctacggacttactcaaatgagctggataaagaaggctctttgcttatagttttcgggttttcttttgcggatgagcatattgaaacccttaccaaaaaagcgctgcgaaacgccacgctcaagattgtaatattcgcctacaacgtggcggcgaaagacctatttcttgataaattccgtgattattccaacgttgacgtagtttttacgcctggagttccgttggacttcaaaaagatgaatgaaattataaccagctttctgggaggcatgaaatgacctccgcttttgttaacgaagaagcagtattaaggatcggtgaggttcgtgaagtgtcgggcagaacactcagtgtgcttgtcgataaaaataaaaatctgagtgaccttttctatcacggcaaggtgcttaaaaatgtttcagtgggcagcttcattgaagtcaagaaaggcttcatgactctgattgcaaaggtagaaaccgagaaaattgtcgaggaaaaagcacctgttggtagcggaagcgattcgcttcgcttccgtcgctatcttacggcctcactggcaggctacattgaccggaacgggcgctttactggcggaacacgcgagttgccccttatcggcaatgaagtttttctgatgtctgaggaacaacttcatcttatccactcgatcgcaccgaagggcgaggccgggctgaatttttctcgcacagatctcgaagatattgatatcacactcccgataaacggccttcttaactcacacattgccatcttcggtaatactggcagcggcaagtccaatactctggccgcgctttaccagcatggctatgaggccctgaaaaacctactaggcgaaggattcaggagtcagtcacggtttcttttatttgatttcaatggtgaatatggtgggagaagctgcattacgcgcgacaaggttgtttacaatcttagcacgcatgatgaagagggtgatcgcattccgatgcctgctgagatactgcttgagcatgagattctctctgtcctgacggatgctaccgacaaaacgcagaaaccttttctgaagcgagtgcttgaattcaaaaagcgagtggagtcgaagcagaaccctcagtcctattttcgtgaaattctgaaacggcgggtcaccgaaactctgtttggttgcgaaaagaaaaaaagtgacgacctgattgatttattccgccccgtactgaaggacgaagacctgatagcagatattgactttttttataacaacggcggtgtatggcgaactaagacaggtgtttacttttctaatgaagaaaatacgcatcagtgcaatatgtaccgcagggctcagaattatgaatttcccgacgatataatggaagagttgctggactatatgtatgttcagctaattattgaatatctttcaagccgctcaaatcctgaacatctttctcctgtcatcaaccgaatgagcggactcaaaaaagatattcgtaaaattttcaatacagcatccggcggaaccatctgggcagcaacgaactttgttgtcctgaaccttaatatggtcaatctgaccatgaaaaaaacgcttccacttttgatggccaaatgggcttattcagcaaaaaaaatggataaggcaccgtccactctccatctcatcatagacgaagcacacaatatcctttcgaacacctcgtttagggaatcagaaagctggaaggattatcggctcgaaacgtttgaagagataattaaggagggcagaaaatttggcgtctttgtgacgatatccagtcagcgaccaaacgatatctccccgactatcatttctcaggcacataactatttcattcaccggttgataaatcagaacgatctgtatgctattgaaaaatccgtttcctacatagaccgcatgactgaagaatctattccaacgcttgcaaccggcacctgcatattcagtggcgtgatctgccctatgccacttaagcttcgtataaacgagctgtctttccgcaaaaagccgcacagccatacgcttaattttgaagacctaatgctttagccacggctgccgcttctttgagaagaacggcagcctgtctacgcgtaagttatccccgttcagtacgtgcagctcagctaatgcgggaatcgcgtccggctcgatcacctccataaacgccgcctcaagctatagattcttcttgtagtactagtagtaattacaaaaagtgcttttatgctttttaagcattgcttttgtatttttaataatgtcattttttatccctcactcctttcttttccagagatccgaaaaccctgaaagccggatgctaactatctgaggtgaaggtgactatgtgtttacgctggcagccacgcaacctgaatggtttatcgtgatgtgctccggcatacgtaaatcctacaccggagctaaggagggattactcctgaaggtgcagctccttcagattcgtttcaaagtaatcaacataaattcgctcatttttgggcttcattatcagctgaataccgttgggaacgggcggacatgaggcccggtaggcgaacatctcatcctggatattccggagcgtataacccagttgctcttcttctgtccttccggacaccctgatcccggataattccttctcaacgtactttttcagcttctcgcttcttttcatactgctgcgattatccagaaactgaagcaagaaatagcggatgaccggcagtgtgaacaccacatagaagaggatctcattcagtccggatttcatggcgatgccgtaaacaagcatcgcgacaggcgagacaataaaagctgaaagataaaacacgtgcagcacctccctgagcgatttgtcccagccgaggttttttccgtggcacaggagcgccattacggccagcggcgcgtcatacaccttactgacgtaccacccctcttcgccaaatcgctttcgtgctttttccggactgtccctgaaataggcagcttcccggatgatgtcatcgcgagggatctcctccaccttcaggtcattgcgccggatgcccagtacccggcagtcgtacatttcctggattgaggctgccttcctgcgcagtgctgcgatgtgtccgctgatgataatgttaaaagtaagcaccaggagtccatacaaccccagcagtgaagacagcagctctgaatcgacaaatccccggctccggttgtatacggtaacgagcgaaagcaggagcggcacgatgatgctgaagataaaattcagcctgttccagttttttaccctgtcgtaaacacgggcctgcgcatacagtaaatccaggttttctctggtcgactggttcgtgtaaatggcattcatggttcacccgtaaacaggaaagaacggcccgaacacatcgcgccatttattgatggatttttcatactcattgttctcctcaaaccatctcgcctccgataccttctgcgcatcgagataacatctgtcagaaatcgccttacgcgcctcggctgaaagagagttgatatctccctgtatgcctttgggatcgttgacggagaactgtacgtacagaccgagatggcggaaaagcgcttccaactccatatcgacaaacgatgagcaggctgccctgccggcgtaatagtccagaatcagcgtctccagcaggtaggaactcatggagggcatcgtcggtcgccgctgccagtacttgactgctctgatgacattcagcacattgccgtcattctgcacattgacagttgtgactctgtccctgtctttgcgggggtcggtaaacttccagtggcctttgccgtcggggatcagatagtaagtccgtccaaaggcatcttcgctggtaataaagcagggtacgatatcaaaattccagtccttgctgaccagtttcagcgtgacggcttcctggttacgcctgatatcagcctgcgcgtactgggcaatgtcctgcaggcggtttttaaaggcattcagaattctgacggagcagatagtgtcagctccggaatgccgatatccgtgcaggcgcgacccctcgccggaagaggtcagagtgatccggtcactcagaacgttataggtggcactctgcgcggataagccgaacatcagatcgatatcgtccagaggacggattttggttcttctggcaaaggatccaaaggcaatatggatcgctggataactcaccggaaatttatcgtccttctcaaaatcattcatcttaccgataagccagtcgcgacttgcacgcgcgtcatcggtatctgcctttttgagattcacgatatctttcataaattcgttaaaggcagctattactgtggtcgccatgttcagtcctttaattatttattgcaaaaggcgcagggctctgtcgtacatctgaacactccagtgccctggaagagtcggtacagtttattcttagtaccacaagttcactaccgtctcgctctctacaagggcatataatttacatgggaaataagagcctcgttcttttactgaagataatgcaaatatttttaattattgttaccaagtaagcaatagtgcgattatgttcaatatttatcattagtattgcgttatcagcacaaatccttcttctctcctccttagatccgaaaaaagcaagttccggatcacggcgattttctgcgctgatttgtgaaacgaaaattaaaaatgtgctacactttaagtagttagataactttctaccctcctccgcatcagaccgacctgacgagtaaatcctgttaatctgttcatcatcnnnnnnnnnnnnnnnnnnnnnnnnnnnnnnnnnnnnnnnnnnnnnnnnnnnnnnnnnnnnnnnnnnnnnnnnnnnnnnnnnnnnnnnnnnnnnnnnnnnnnnnnnnnnnnnnnnnnnnnnnnnnnnnnnnnnnnnnnnnnnnnnnnnnnnnnnnnnnnnnnnnnnnnnnnnnnnnnnnnnnnnnnnnnnnnnnnnnnnnnnnnnnnnnnnnnnnnnnnnnnnnnnnnnnnnnnnnnnnnnnnnnnnnnnnnnnnnnnnnnnnnnnnnnnnnnnnnnnnnnnnnnnnnnnnnnnnnnnnnnnnnnnnnnnnnnnnnnaaactttgctattatgaattttcggaagtctaaaagagtgagatccggtaattgcgggcggtgactgttattctgctaatcactgcgggcgggcaacggaatgttctgctggcgatgataaataaatagaactaatagatattaaataataaggaagttgattatgaatatgaaaattacactgagtgttttatttgaggctctcataatccttgggcatgacagagtctggatggaagaatcggagtttgagcacatatacggatacggctgctaccgtgagatacacacttgggacgatcgcacagttgcctggtgggatgatgctgatgacacatggtatctgtccacagaagtcgatgtgataactcctttccttggccctctcccaaagaaagaaggagagctctccgaggaaaaatgcttccagttaatgactcttggtcgctactgatagccgacagcagcatttaatgagtggtcggctggacaccctctggcggccacatgtcactcgatagtgtagtccggcgggatttctccttgaagatgatccagacattaacgtaaaggatacaggaacgatgtgtaaactgaccggttttataatggggctgacgatcctgctgggtgtgactgcacgggatgcaggggcggcaacgctcagtgaaatgcggatggttaatgccagtcagaaacccgggatggtgattatctgcagccggacctcggagattccgcagaaaggtgaatcccccgttcgtatagaaagtctcctcaggggcgtggtactgcagaacgacggtgatcgcatgatgtttgacgtgacctatacacagcgaaacgctgaagagagtattccttttcgtacggaaaaataccggctgaccactgagctggaagccacccgccagaaaatggccatcgatcctgagacgatagaactatcgcttccgcgtgcccgcggtcttgaagaaacttttctcgcggggatgaaagcaagcccggtttcgtttgaagattacaccaattaccgtgtcaaatctgctaccgagtatctgatcctgccgggtccggcatccccggatgcaccggtgatgcactgcacactctaatgacaatggtgacataacatgatgccagcactgccaggccatagcggggctttttcctctgctcagctgccggtggccatcgattacccggccgcgctggcactgcgccagatggcgctcgttcaggacgaactgccgaaatacctgctggcgccggaagtgagcgccctgctccactacgtgcccgatcttcaccgtaagatgctgctgaccaccctgtggaacaccggcgcccgtattaacgaagcactggccctgacccggagtgatttttccctggccccgccctacccgttcgtgcaactggcaaccctcaaacagcgggtggagaaagcggcccgaacggccggccgtgctccggccggcagccagcctcatcgtaacgttccgctttccgatccgcagtatgcccgccagctggaaatgatggtggccaccctgaaaataccgctggaacgccggaataagcgcaccggcagaacggaaaaggtgcgcatctgggagatcaccgaccgtaccgttcgcacctggctgggcgaagctgttgaagcggcagccgccgacggggtgacgttctccgtgccggtgacgccacacacgttccgccactcctacgccatgcacatgctgtatgccggaattccgctgaaggtgctgcagagcctgatggggcacaagtcgatcagctcgacggaagtctatacaaaggtatttgcgctcgatgttgctgcaaggcatcgtgtgcaattttcaatggcagaggctgatgctgttgccatgctgaaaaaaagataactaaatttgtcaaaatttacagacagttgtaatgacatccacttattcgataataaattaatcttgcgttacgtgaaaactgacaggggtccaggctgtaccaggccggaattcacgtaacgcactttacgtcttcttcattacttaccttttcgttccgatcctgttcatccctgcattgcccccttttcttcataacgcatttcactgttgccgaaagcccatggggtcgactttgcgaccgcggccgcactcagaaggatggccactttaaccggcgccaccctggcgtacctactcgtccccgaagtgagagccctactcttctatatgccggatcttcaccattaaatgctgttctctactttctggaacacgggagtgcggatcagtgaatcccggacgctgcccccggaatcctttgatctcggtgggttaagaccctttgtgaaagtactgggctaagggcatccgccctgacgaacaatattgactaagtgatgaaagtaaacatatcgcagtgaagatgttgagcagactgcccgctcttccacacaccgcagtcaatatcaatactccggtaggcctatccgcatatcgcagtcaaggcaagcaaaacctaaacggaatgatgaatcagtataaattgactgtggtatgcgctctgcataccacagtcaacaaactctaaaacggcattcctcagtcatttcccggtttcacgctggcgagcgcttttgctagtttctgaggatcaatacctgcagccttcagggctttaataacttcgtcatagttctgctcaggtacttcctcttccggctcacggggaacaacgaccttgctactgatgagtttcggattacggtaatgcacgctgaagtaggtggcccggccgcgtttgaattcggtgtaatccagatagccgatatccttcagctgcgccatggctttgcgcaccgtgtggttctgcgtgtagaggttagacgtcaggttgagtctgtctcgcatacgcttcatggagatgggggccggattctgtggcagactttcaatgtaggtatagagtgcctgtgcggactccttgcgctgcagggcatcaatggctttcagacgcaacaggacccgcctgtccatctgataaagctcaaagagcttgggctctgccctgatctccacgacatcggcagtgatgtcgtaataggcagactgaaccaggtgcgtagtccaccctttcgtttcactctgaaacttgagggttacggatgccagcttgaacagggagttgcttatcctgtcacgcattttcttgttagagcgccgggagtcaaagccacacattttaacaaactcaacaaaagacagcttgagcgtgtcatccttaacgccaaaatcatacattgaacggatgattccaagccagactttgaagtccgtatccatatcgaggcgcgatccggtgatcctgacatcggtatacccttcactccgggcaatggacagctgtacgagctcctcagtcgcatccgtgacgtttttgcggttcgtcttactcctagaggtcgatttgagggtaggaacgaacagaccaagcctcatgagcgcaacaggctgaacagtactggcgctgttgacatccagcttaacaacttcacccgttgtcttattgacctcctgaagattcaggggtaactcattattttccatagccattttattaacccgcggttatccacaaacgaaagtatatacgcatatcacagtcaacggaaatacataccccagttaatacaattgcataccgcaatagttgatctcgcacacaacagtcaacataccacacaccacagttaatgaagatagtctccaggctcaggcgtagcggggcgctaaacgatccggggatctctttttgatctcaacatgatctccttaaggatcaattactggatcgaaatatggaataacagccagcatccaatacatatggaccactgacatgacacaatgtgaatcttggtacaacaacccagtaatacaacaccaggaaaggcaatagtcttgactgtgatatgcagaaaaatgcatgtcattactcttccctattcctattcagcttcataccgcagtcaataatctgcatactatagtcaattccttaccattcagttccttccagtggagcttcgttagcttcagagcgtcagccacaccttgttagtacggagtaattccgcttcctcgacgcatgcgcctacgcgcgcatactttctgcggcgagcggatgatattgactgaagcatgcggcagcctttcaggcggatgctgaactgaacaagactatattttgatcggctttgcaatatttaagacggtttgcaactttaatgttgctttgcgccttttaccaagatttaatagattaatgcaaagataataataaggaacaaagaatgggactgatggaaacgcttgaccagtgcattacggccggtcatgaaatgacgaaagctatcgcgattgcacagtttaacgatgatagcccggaagccaggaaaattacccgtcgctggcgtgtgggtgaggccgccgatctgattggcgtttcttctcaggcaatccgtgatgcagaaaaagcaggacgccttccccatcctgatatggaaatgcgtggacgtgtagagcagcaggtgggctacaccattgaacaaatcaaccnnnnnnnnnnnnnnnnnnnnnnnnnnnnnnnnnnnnnnnnnnnnnnnnnnnnnnnnnnnnnnnnnnnnnnnnnnnnnnnnnnnnnnnnnnnnnnnnnnnnnnnnnnnnnnnnnnnnnnnnnnnnnnnnnnnnnnnnnnnnnnnnnnnnnnnnnnnnnnnnnnnnnnnnnnnnnnnnnnnnnnnnnnnnnnnnnnnnnnnnnnnnnnnnnnnnnnnnnnnnnnnnnnnnnnnnnnnnnnnnnnnnnnnnnnnnnnnnnnnnnnnnnnnnnnnnnnnnnnnnnnnnnnnnnnnnnnnnnnnnnnnnnnnnnnnnnnnnnnnnnnnnnnnnnnnnnnnnnnnnnnnnnnnnnnnnnnnnnnnnnnnnnnnnnnnnnnnnnnnnnnnnnnnnnnnnnnnnnnnnnnnnnnnnnnnnnnnnnnnnnnnnnnnnnnnnnnnnnnnnnnnnnnnnnnnnnnnnnnnnnnnnnnnnnnnnnnnnnnnnnnnnnnnnnnnnnnnnnnnnnnnnnnnnnnnnnnnnnnnnnnnnnnnnnnnnnnnnnnnnnnnnnnnnnnnnnnnnnnnnnnnnnnnnnnnnnnnnnnnnnnnnnnnnnnnnnnnnnnnnnnnnnnnnnnnnnnnnnnnnnnnnnnnnnnnnnnnnnnnnnnnnnnnnnnnnnnnnnnnnnnnnnnnnnnnnnnnnnnnnnnnnnnnnnnnnnnnnnnnnnnnnnnnnnnnnnnnnnnnnnnnnnnnnnnnnncagagttatttgattacacctctgcccttcagttttttgacatgctgcgcgacctgttaaaaaacgtggacctgcagggttttgaacctgacgttagaattcttctgaccaagtacagcaataacaatggctcacagtcaccctggatggaagaacagatccgcgatgcctggggaagcatggtactgaaaaacgttgttcgcgagaccgacgaagtcggtaaaggtcagatccgtatgagaacggtgtttgagcaggctatcgatcagcgctcatctacaggagcctggcgaaatgcgctgtctatctgggagcctgtctgtaatgaaatttttgatcgcctgattaaacctcgctgggagatcagataatgaaacgtgcaccagtcattccaaaacataccgtaaaagatatccgccccgaaactgaaccttcagcggcacccgctgcaccgatggttgattcattaattgcacgggttggagccatggcccgcgggaataccattctgcttccggtttgtggccgggaagtgaaatttattctggaagcgatcccgggcgagagtgttgagacggcatcaagagtctggtcaggtaatgaacgtgaccaggaactactgaccgaagacgcgcttgatgatctgattccatcttttatgctgagtggtcaacagacgcctgcgttcggacgaagggtagaaggtgtcattgaaattgctgatggtagtcgccgtcgtaaagccgccatactgacatcatcagattatcgtgttctcgtcggggatctcgatgacgaacagatgatggctttatcacggctgggtaatgattatcgtcctgtcagcgcttatgaacggggcaaccgttatgcacagcggttggaaaatgattttaacggcaatatctctgctctggctgaagctgagaatatttcccgtaaaatcatcacgcgttgcatcaacacggcccatttgccaaaatcagtggttgccctgtttactcatcctggtgaactttccgcccgctctggggagacgctgtacaaagcattttcgggaaaagaagctttattgttgcaacggacacaacagcttcatgagcaaaagaaagcgggagttatctttgaatccgaggaagttattggtttactgacggatgttctgaaagagccatcaggtaaaaaagtaaaccttaatacccgtcatcaatttgtacctggtgcgacagccctatacaaaggcgataaggtgatttttaatctcgataaatctcgtttgcctgccgagtgtatcgagaagatagaaagcatactgcgcgacttacaaaaagtttagcctgtttaatgatacacgcgagagtcttcattaatttccaatatccttaatgcgttacatgctgcttcggaatatatacatccgaagcagttattttctgcactatagcccagtgttgttaaaaagatctgtttacttctcccaacctgattgttaccacaatctaaagatccagttttttctagttttccttaactagttccgcagttcacccctcaacctgcatatcagaactcagacggtaacccatcccggaatactgatttcatacaccagattaactgggaccacggtcccacttcctacttgcgtgtcagaactcacccgtcaagcccgcttggaatatcgattccacacgccggatttaactgggaccacggtcccacctcctacttgcgtgtcagaactcatccttcaaccccgcctggaatatcgattccacacgccggatttaactgggaccatggtcccactctattcagctgtttctatcacaatacagattttgagattgttactgtgattcctgtattaggtgcgtaagaagattatgttcgttttgttccctggtgcttcctcgctcactcgcgggcttcgccctgtcgttcggctgcggcgagcactactggctctctcagaaaagcagaatttatctgatcctcgcaacgggaatatctttccagcgggtggtgtacgcaggggagagcatatcgcgtttcatttgccatgatggcgctatccctcgcccggcaaaccagatctgtcccagaccggaatgattaatgccatcgagaaccttcatcagctcagagctgtgaggacgtggcggacgttcgtcgaacagctgcagctgcgaaacgccggagccggtgaagtcattcagcatcacaccggctttggcatacaggtgcccatccttccagatacgctccagagccgttgtggcggccgcaataatgtcccgggtgtcctgagtgggtgtaagcagtttctccgtggccacgttgccgtagtaaggctctttaacggcgaacggagacgttttgatgaaaacggaaatatgccggcagtactggcgctctttccgcagcttttcagaggcccgctctgcgtactgacagacagcctggcggagcgaatcgtactccgtgattttctctccaaagctgcggctgcagacgatctgctgtttcgtcggtggtgcttcctcaagcgacatgcagctttccccgttcagttcgcgtactgttcgctcgagaacgacggagaaatttttgcgtataaaggccgggttcgtcagggccagatcgagcgcggtcctgatacccagtacattaagtttgcgtgcaatacggtttcccacgccccagatctcttcgaccggctgcagtgaaagcagtttccgcgttcgctgaggattccccctggtcagggcgagcacaccacgaaactgtttccactcctttgaggcccactgggctgattttgccagggttttcgtcggcccggcacccacgccgatggtcagacgggtacagtcatacacgtgctggcgcagctgccggccgaagtcctccaggtccatgcagtgctcaacgccggtcaggtcgaggaacatctcgtcaatcgaatactgttccacccttggggccagctcctccaggcagctcatcacgcgcgctgacatcgaggcataaagttcatagttgcttgagaacgcgtatattttttccggatacgtttcgtttttcatctgaaaccacggcgtgcccattttgatccagggctttgcctcggcacttcttgcgataacgcagccatcgttattactgagcaccacaaccggctttcctttcaaatccgggcggaaaacacgttcgcagctggcataaaagctgttcacatcggccagggcaaacatcagtacatctccctcgggcggtggatgatgtgcgtgacgacgccaaagatatccagatcgtccgggtcgggataaatcggcggccaggcggcgttcattggctgcagcgtcagtcgtggcgtcagcagaagccgtttaaccgtaaactccccctgcacactggccacaacaatatcgccgtgccggggcttctctgcactgtccacaaccagcagatcgccattgtaaaggctgccgtcggacatactgtcaccgctggcacggagatagtaagtcgcgctcgggtgccgtatgcagtaatcatggagatccaggtcggactcgacatagtcagcggcagggctcggaaaaccgcagctggccaggtctgcaaacaacggatgggcctgtggcgggagtgctttcccggtgctgaaaagctgcagtttcatctttcctcctgacgtctaaatatactggatatgcatacagtatatttaacagcgtgaggataatccagatcacctgcttcatgaacagggtgagtaacctaagttactcaaaatgctatttaatatcattatgggacatttaaattactcataatgagaagcatggcttttattttgccattttgctcttataatatgtatcaaattgagtttaattgacggagcataatgatgaatatttactgcgatgatggttcaactaatgttaagctggcatggtttgaaggaaacgagctgcagacccgggtttcagctaactccttccggcatggctggaaagtggcggaattcagtgccgcaacgttcaactatcaggtgggcacgctgaaatacacctgggacagcgtcagccgggatgccatcccgacaacaaacgtggaataccagtacggtgatctcaacctgctggccgtgcatcatgccctgctgaacagcggacttgagccgcagccggtgagcctgaccgtgacgctgcccctgagcgagtattatgacggggactgccagcggaacgaggagaacatccgacgcaaacgagaaaacctgatgcgtgagctggttctgaataagggcagggcatttaccgtaacggacgtgaaggtgatgcctgaatcactgccggcggcgttctcccgtctcgcggagctgaagcccggacccgctgagaccaccctgattatcgatctcggcggaaccacgctcgatgccggcgtgattgtcggacagtttgatgatatcagtgcggtacacggcaatccgtctgtcggcgtgtcacaggtcacccgcgcagctgcaggcgcgctgcgggctgcagacagcgaaaccagcgcgcttattgctgacacggtcatccgcaaccgcaatgatcgtcagtatctgcagcgagtgatcaacgatgccggaaaaattgacgatgttctgaacaaaattacagaggcaatcacttccctgggcgcgcgtgtcaccagtgagctgacggtcttcaggagcgttaaccgggtattcctggtcgggggaggggcatccctcattgaagaggctatccgtcaggcctggcctctggctcctgaccgtatcgaggttatcggcgatccgcagctggcgctggccagagagattgccctttacaataaagaggactaaacgtgccggacggccagtattctttctatctgcacagcgacgatcgcaccgacatcacggcgatggcgaccatcagcaccatctcacagcccctgcgcggtgacttcatccggaccgccgccaccgccggggcggtgatgtaccagacggatgcccgtttaccggcgctgatcccggtgttctttgacggacatctgagtgccatccggctttgtgccgtgatggccctggtatccggcacctggtcttcactctcaggacttcctgatgagcctgatggtggcgtggctgctctggccatgtcaccggagacggaataccagcgccggcgttacaccctgacgcttcaggatgaccggagcagtgaacgggttgagcgtgtgctgacgggcgtgtcatcccgcctgcgcggagagctgctgagaaacctgattatcaccggtctggccctgcatacgaccgcaccggagctgccgcgtctgctggccagtatgccggtaccgcccggcacggtcagcgagctgcaggttctggttcagcagatggctggtacggctgacgtgagtatggctgcagtgccggagaaaccagcggagcctgccgcaccggtatccgctgaagcgaccagcataaagaaaaatatgcgccgggcattcggagactagagcatgtcagtgattaaacaaaaagcagtgcagtgcattcataactttctgcgcgcccggaacgtgcctgaatctcagtggccggaacgggtcaaaaagaccggcaggggaatgatactggcaggcgtggccgtcgtggttcctggcgttctggttgataacatctcactgccggtgacaatcgcgatgcaggtctgctatgcctcactgatcggcctcggggttctcttggcgtttgacaagaaaaaaccagaggggcggggatgaatatgaacattaacctgaaggaaacagtatgctgcttgaagaactgacaggagacgaacgtacgctggtcgttgtggcactgcaggcgttgttccgcgagagattatccgcatcaaatgccgtctttacggtatgtagcctgtccggaaaagagcagccgccggaagatatttttgggctgcgtgaagtagaggatgcgctgagacgtattggtgcagctcctgcgcgttaaatccggtcccgtacacttcagaaaaaaacggcagggtgacatctcatccctgccgtcaaaactaaacgcttaatttttcggcgattataatgtattgttttgtgatgtaaatcacattttaatttaatgtgaaatttttcctccgctttacatctcccgtaaaaaattacccgccgtgccttcacgctaacccggccgctgcggtcgcaagggttcacgttgtctccgtcctcacccgttcgcgccctnnnnnnnnnnnnnnnnnnnnnnnnnnnnnnnnnnnnnnnnnnnnnnnnnnnnnnnnnnnnnnnnnnnnnnnnnnnnnnnnnnnnnnnnnnnnnnnnnnnnnnnnnnnnnnnnnnnnnnnnnnnnnnnnnnnnnnnnnnnnnnnnnnnnnnnnnnnnnnnnnnnnnnnnnnnnnnnnnnnnnnnnnnnnnnnnnnnnnnnnnnnnnnnnnnnnnnnnnnnnnnnnnnnnnnnnnnnnnnnnnnnnnnnnnnnnnnnnnnnnnnnnnnnnnnnnnnnnnnnnnnnnnnnnnnnnnnnnnnnnnnnnnnnnnnnnnnnnnnnnnnnnnnnnnnnnnnnnnnnnnnnnnnnnnnnnnnnnnnnnnnnnnnnnnnnnnnnnnnnnnnnnnnnnnnnnnnnnnnnnnnnnnnnnnnnnnnnnnnnnnnnnnnnnnnnnnnnnnnnnnnnnnnnnnnnnnnnnnnnnnnnnnnnnnnnnnnnnnnnnnnnnnnnnnnnnnnnnnnnnnnnnnnnnnnnnnnnnnnnnnnnnnnnnnnnnnnnnnnnnnnnnnnnnnnnnnnnnnnnnnnnnnnnnnnnnnnnnnnnnnnnnnnnnnnnnnnnnnnnnnnnnnnnnnnnnnnnnnnnnnnnnnnnnnnnnnnnnnnnnnnnnnnnnnnnnnnnnnnnnnnnnnnnnnnnnnnnnnnnnnnnnnnnnnnnnnnnnnnnnnnnnnnnnnnnnnnnnnnnnnnnnnnnnnnnnnnnnnttcgcacctttcacggtgcattcagcccgtgaaaggcttgcgctgcggcttgcggcgtcgcccctgcgccctccgcttttcgccgggtttttgtggcggcacggcgcaagagggtgccgcatatcagagaggagtgtgtctatgtcccgttttattctgggtgactgcgtgcaggtgatgtcccgttttccggcgcgtgccgtcgattttattcttaccgacccaccgtacctggttggctataaggaccgtaccggccgcaccctggccggggacaactcttccgaatggctccagcccgcctgtcatgaaatgtaccgcgtgctgaaaaatgacagcctcatggtgagtttctatgcctggaaccgcgcggatctgtttctgaatgcgtggaaaacggccggtttcagggtggttggccatatcgtctttgccaagagctacgcctcaaaatcgacgttcgtgggttacacccatgagagtgcctacctgctggcaaagggaaggccgcaaaccccggaccgtcccatcccggacgtgatcccctggaaatacacgggcaaccgacatcacccgacggagaagccggtgcagagcctgcggccgctgattgaatcgctcacgcgtccgggggctattgtccttgacccgttcgccggcagcggctccacctgcgtggccgccgccgaagccagccgccgctatatcgggatcgagatgcttgagcagtaccacgccgccggcgttcgacgtctggcacaggttgaacgggcaagaaggatgccggcggccaatgacggcgcgttttaccccgactatccggaggcggcatgaactacccgggccttgaaaacctgcgcgcggacgtggccgcgctcagcaatgccatgtgtgacgtgcggatgctgctgaaccgcctcgaatcgcagcaccggcacgacgcggcaacgcttaccgaacgtatggctgcgcagactctgcgccggatcaacaccctgcttcttgaagcctaccgcgaagccctggtgctggacgaaacctttcaggactgactgaccctgccgggctgatgcccggtctgtaaccccttacaagagagaacaaacgatgtacggaacccgcgaagaactttgtgtacagcttgaaaacatgttcacgtttgacgaacccctggtcctgctggtctggacggaagaggggattagcgtggcctgccgtgaagcccagccagaaccggacggggctgaaatccggaatctgatgaaggcgatcggcgaaatgaaaatgacgcaataccgccaggagggggtaaataatctgactgtcagcgatctcctggcccgtcagcgggaagcggcaaaccgtcaggtgagtgttccggcggtactcctgccccgcgtcctgcgtaactatgaatgtgagctggaaaaccggatcggtatggcctgggaagccgggcggcaggagcctgaatccgtcaggaatgagctgaaggacgttcacgccttacaggagacgctggccgcgtaagggaaagagccggggtaacgccccggcaaccggtggacatccacagcgaaaaggatgtcagtgccttccgcttctatccgccgctgccctccgggccacgtcgggacaatgaaactcccctgaagctccgtgcggtgacggcatgcgccgtgacttcactgtagcccggccgcatcggccacaagggttcgctgacgcctccgtcctcacccgttcgcacccttcacggtgcattcagcccgtgaaggctttgcgctgcggcttgcggcgtcgcccctgtgtcctccgcttttcgccggtctgtcgtgtcgtcacggcgatgccggaaccgagaatatgttaaccgtggaggatctatgaaccagaccgtgacctgtgatgctgttcgtcttgagggtgcgcagcgcctgactttcctgcctgatttgtttggcggcgattttatgacgtccgaggcatccgtgtacgcctatgcccagcgttactgccctgagtatcaggggggattctggcagttttaccggctgccggaaggtggcggatatatggcgcctgacgtggagagcctgaccctgtgcaatccggacaactggtttgagcagactgtcagcggggaagtggcggggatcattctcacggcgctggtactgaatcaccggagctggcaccacagcaaccatgaccatgaagagctgtgccgccacttctgccgtcgctatgagcagcttatggcatttgctgatacccatcctgaaagcgccacgatctggcgtgcccttgactgactgaccacgggcggcgatgccgcccgactaaaggagaaaacatgattggtacagcaaaagagatcgctatcgaaatgctgcgtgatgacgataatgacggcgagaaatttgtattcgccagctggagccggaacgatattcgcggtctctgcattgactgggatctcagtgatgaagagatcgacgtggtgatggaaagactggaggcagagctgtatccctccggatgtgtccctctcatctacaacattgttgagatgatggtggaagaaaaacggaaacaccgtaatgtcaccattccggctgcggcgcttgcggtggtgatgcagcttgcagggaaggaaatggagcgtatcgctatatgcgcggaggatggaggcggatcagcggcagaaaccctgaaagaagaaaatgaagtcatgttgcgcctgcgcgctgcactcaatgcctgactgagaaaccggaggcattgcctccggaaactgaaaaaaggagaacaccatgcaactgtcaccggaaacccgcagcatcctgcgccagtataaaacgctcatcaacgagcgacgtcgtgaatcatgactcagccccgtaaccacagcgaaagtgctggatgagatctgcgaatccgctacccgccagtgcgccgtctatctttgcggccacttcattctccagggcggtcagggggatggaannnnnnnnnnnnnnnnnnnnnnnnnnnnnnnnnnnnnnnnnnnnnnnnnnnnnnnnnnnnnnnnnnnnnnnnnnnnnnnnnnnnnnnnnnnnnnnnnnnnnnnnnnnnnnnnnnnnnnnnnnnnnnnnnnnnnnnnnnnnnnnnnnnnnnnnnnnnnnnnnnnnnnnnnnnnnnnnnnnnnnnnnnnnnnnnnnnnnnnnnnnnnnnnnnnnnnnnnnnnnnnnnnnnnnnnnnnnnnnnnnnnnnnnnnnnnnnnnnnnnnnnnnnnnnnnnnnnnnnnnnnnnnnnnnnnnnnnnnnnnnnnnnnnnnnnnnnnnnnnnnnnnnnnnnnnnnnnnnnnnnnnnnnnnnnnnnnnnnnnnnnnnnnnnnnnnnnnnnnnnnnnnnnnnnnnnnnnnnnnnnnnnnnnnnnnnnnnnnnnnnnnnnnnnnnnnnnnnnnnnnnnnnnnnnnnnnnnnnnnnnnnnnnnnnnnnnnnnnnnnnnnnnnnnnnnnnnnnnnnnnnnnnnnnnnnnnnnnnnnnnnnnnnnnnnnnnnnnnnnnnnnnnnnnnnnnnnnnnnnnnnnnnnnnnnnnnnnnnnnnnnnnnnnnnnnnnnnnnnnnnnnnnnnnnnnnnnnnnnnnnnnnnnnnnnnnnnnnnnnnnnnnnnnnnnnnnnnnnnnnnnnnnnnnnnnnnnnnnnnnnnnnnnnnnnnnnnnnnnnnnnnnnnnnnnnnnnnnnnnnnnnnnnnnnnnnnnnnnnnnnnnnnnnnnnnnnnnnnnnnnnnnnnnnnnnnnnnnnnnnnnnnnnnnnnnnnnnnnnnnnnnnnnnnnnnnnnnnnnnnnnnnnnnnnnnnnnnnnnnnnnnnnnnnnnnnnnnnnnnnnnnnnnnnnnnnnnnnnnnnnnnnnnnnnnnnnnnnnnnnnnnnnnnnnnnnnnnnnnnnnnnnnnnnnngaaccaggatgcacacacgaaacgtcaacgtcaaaaccgccgctcaagaatcttccaggaagatgggggaagaacaaaaccctgtttctgtcgcacgggagtgggtggctcaggccacttcgctgaaggcgggggtcaccgtcaccctgtccgatgtgtcccgatacggcgacgtgcaggtggagatccgcaccaacggaacgcttaactggcgcgcctggtcgtttgaaccggattttctttttgaactgaaacgcaatctgcaatacgtgcagctttaaccggaggccggatgtccggctctaacccagagaaggaggaaacatgcagaaccttaacacccgtccggcgacccgtaaggtcgggcagagcaccgaaatcgtgaagctgctgcgcattcaggccagcgacacccacgtggtcgagtttgacaacgtggacacccgatttaatgactgcaacaactggcaggtgatggcaggaggcaaacgagtcctgttcagcaaccgcatgtatgagcgtttttcagatgtgaaatcggggatcgtggcaacgatcaacgtttgtgaaaacagcggcagcgtaacggataaagcgatgctggaaggggcaaaagtcatgatgcagcttcttgatggctatccgtcctttggagcactggcagcacacccgaaacgcattaccggttaaccgagtgccgtgaccggatcgcactccggccacggctaaccacaactatcactgagaggtaaaaatcatggtcgccaccaatactacggcaaaaaaaccagctaagaccacccgtcagacaaaatctgcggaaaaaatcgcgcagtctaccgaacagaagctcgtccagctgctcgctgatacgcccgtgcaaatcttcccgtactcccgcctgtcacacacgggcttaaacacgcgcatcattccgcataccgatcgggaagtggaagagatggcagacagcattcaggcaatgggcatcctgcaaaacctgatcggtgcagaactgccggacggtacgatcggcattgtcggcggggaaggtcgccgcagaggcacaggcattctggtgatgcgcggtgttctcgatgcagacacgccgtttgttccggtgaaagtcctgcccgtggagatggctgtggcggcctcgatgatcgagaacggtcgacgtaaaaacatgcatcccgccgagcagattatcggttttcgtacccttcagcaggaaggtaaaacggcttctcagatcggcgcactgatgggttatcacccgcgccacgttcagcgctgcctgaagctggctaatcttgccccctccctgctggatgcgctggcgcgggatgaaatcacccttgagcattgtgaagtgatgacccttgccgacactcatgaacggcagctacaggtctgggaagaagcgaaggcacagtggaacggcagtatgccaatgccccatacacttcgcaaaatggtgactgacgacaagatggccatcagccacccgatgtttgagtatgtgggcgaggaagcctataccgccgctggcggtacgctgaccgccgatctgttcagcgacagggacagtacctttgccgatgcggcgctggtgagatccctgctggctggcaagcttaccgtgctcgccgctcgcgttaagcaggagcagggctggggctgggctgagttccgcatgacggaactgcgcgccagcggtgaggacggtgaactgtaccgttttgccatgccgaaagctgtcctgacggaagaagaacagaagcgcgtcagtgagctggaagaacaaatggaagctactgaaaactacgatgacgaatacgagcttcagcagcagatcgatgacatttactgcgaggcggagtatcgcgaagccacgccggaatttcgcgccgcgcacggtatctgggtgtcatgggatggtgacaatttccaggttcagcctggtatccgcaggctgaccgacgaagaccgggcagaagaagaacaggcgcgtcaggaacgtgaaaacaacgtgatcagacacaccacgcctgaaatacccgctgacgcctatccggcaacgctggttaaggccatgtctgcggagcgcactctcgccgttcaggcagaactggcgggtcgccctgatgtatcggtggcactcctgacgtggacgctatgtcttacgctctttgaccgcacccacggcaagcgcaatgaaccgctgaaagcctccgtgtcctcgaatcagtatcaccttgcatcactggctccatccggtgaggaagggaaggcgctgacggcgctcaaagcacagaaagaggcgcttcaggcaacgcttcccgaaaactggcatctcgatttcacctggctgctgtcatggtcagcagagcaggtgaacaccctgctgggattctgtgcagcgcacggtatcaacggtattcaggaacgtatgtataaccatacgcagaaaagcgaactggacgggctggaagcggcgctggactttgacctgcgcaaatggtggcagccggatgctgagagctacttcggtaagctcacgatttcccagattggcaaagcctatgaagaagccggactcagcgcccgtgcgggtgaagttgtgaaactcaagcgccgcgatgcggcgaaggcagccgagcaggatctgaatgctcagggctggctgcctgactggatggtgcgcccagcgccagccgctgaggctgaagaagccaccgaaaccgacgctgacaccactgaccacgctgcttaataccggaggccgccgccttcgggcggcgggaacagacatgaccatgcaatatgacctgaaccgaattaacaccctgaccgcatccgacctggagtttatccgccagcagggcgaagacgcgcgccgcgcactcagcgacgccgtgaccggcctcctgtccacacctgaaggatggtgcgtctgcgccgagttccgcagcgagttcggcggcttcttccctgtccagtgccgcttcagcgcggacggcagtgatgactggcatctgtgcgtgtgcagccccggcgaagtctcgccgtactggattctggtgctgctctcctccggcggtgaagtggtgcgtaccctttaccagagcgacacgctccagcctgaccggataaatcagctgatcgcgcagctggcaggtatgcgccgctttaactgcactgcccgcaccgtggtgaagctgatgaatgtggaggtgacagcatgatcccgtcctcacacgcgctcgtttccctgaagcccgcccgtcaggcagcaatacaggctatcagccatgttgagtctgcccgcgaacgcggcgcacgactgcccgccatgccgtatgtgcgtacctttctgcgccttcttacgggcagcggtcgcctcaacgccacggtggccaataaaatacctggcctgcactgggtaccaaacaaccgccattcgaacctgaaacaggtcgaggaggcactcaacaccatgatcgccaccggaggggaagcctgcccgctgccgctcacgattgacgttcaggccgagctattccctgaagtcatgcacacccgcacgggtcgacggctgcacagatccggcaataagaccacgcgtcagcttcgccgccagtcccgtgagtacgaacagcgctggaaactgcgccagaacctgctggaacaggcaaaagtcgatctgaattttcagtcaccggaaaccgtctgcacctggtatacccggtggagcgacgagtttgacgcggcagagctggccacaccgttctggaactggcagacgcggttcgcgtcgctgaaggaacttgactggcttcgcatgagcggcgacccgctgtattcagtcatgtaccaaatcccgtttattgtccgggaaacacctgagcacatccgggtcgctgaacgctggcagataccgaacaagctgcgttatcagcagggggcagaatgagaaataacccccgtaaaacggagctgaaggtcgcccgcagccagcgaaataagctccgtaccatgtccgcaaagctgaaagaaatgtgttgcgagtgggacggactgagtggctggctggaaaccgaaagcgagcagctggctgagagtatagacaggcaccttgaggcgctcgaagaccagatccgtgaatggtcagaaggtacggataaccgggagggatattgaacatcatcagtcgcaggttcgacaaaaaagaacccggaaccgtgttccgccatgctgaaagcgggaagatcatgtatcgtctcgatgcccggctggagcgggatgactgggagatagtgcaggcgataatcagccttgtctataacgccggcgtggccgccggaagcaaacagcgagccgctgaaattcgtgaggctctggggatttcaggaactgaatgacgcggaaaaacgatgaggatttatacagttttcagactgttattcctgggcagatgatcgacgacgggatataatggcgatggcgcttgaggctttttgcctcatgacgtgaaggtggtttgttaccgtgttgtgtggcagaaagcagaaagccccgtagttaattttcattaacccatgcacggcgcccatttagttggactctcaaattggagagtcccatgtcaagacgtaagtacacctttgaacagcgcctcgaagtggttatgcactatttagctactgatgaaggctatcgcttaacatcagctcgctttaacgttcccagaacccaggtaagaatatgggttgcagcctatgatgtttatggagaagaaggtctgaagcccagagataagggcgtatcaatcgatcccgaaatcagaattgaagctgtgaaagcggtgctatccggtcagatatctcagacacaggccgcgactaaattcaatgttgcaggtgcgtcatctgtcgccaaatggctaaaagtgtacaaagagcagggtgaagaagggcttcgctcactcaaggtaggcacaaaaagggtatcttacatggctgaacaccctgaacttattgaagccgcagaggaacgatcaaaagagcaacgaattcttgaactggaaaggaaggtcaaacgtcttgaattacggatactttatcttcaaaagctgaaagccttagttcggtaagagataaggttcgtgttgttgacgaactaaggcagcattacccacttgatcagttgctgagtaccgcccgtatacccaggagcacgttttactatcatcttaaagcactacgctctccgggaaaatatgatgaaataaatcgtcgaatcagcgagatatatgatgaaaatcagggccgctatggctatcgacgggtaacgctggcgctcagaagagaagggggactgatcaaccacaaagtggttcaacgcctgatgaatgctcttgatcttaaagccgctatcaaagtaaagcgctatacctcctggcgtggcgaacgtgggtgtgctgctgacaacctcctgcaacgtaacttcaaagccagccggcccaacgaaaaatgggtcacagatgtcaccgagttcgccgtcaacggccgcaaactctatctttctccgatcatcgatctctttaataacgaagtcatttcctacagtatctcagaacgccccacaatgccgatgattgacgacatgttgattaaggcatttgccagaatggacgccaacagcagaccagtacttcattcagatcagggttggcagtaccggcatcggtggtatcagtatcagttgcgggagtttggggttctgcaaagcatgtcccgcaaaggaaactgtctggacaatgcctgcgctgagtgctttttcgggacgttaaaatcagaatgcttctacacccgtaaattcaacgatgttgatgagctgaaggttgttcttgaggattacattcgttactacaacacgcggcgaatcagtcttaaatttaacggcctcagcccggttgaataccgcctgaagacctacccgctgcggctttagccacgttatcctgatttcacctgggcggtctgatgttaacaagggtgttacgcggccggacggccctcagcagtattgataccagccctgttgttgcggggcgtttctgatgttccggacacggccaggctgaaatgaacagcattcaaaatgnnnnnnnnnnnnnnnnnnnnnnnnnnnnnnnnnnnnnnnnnnnnnnnnnnnnnnnnnnnnnnnnnnnnnnnnnnnnnnnnnnnnnnnnnnnnnnnnnnnnnnnnnnnnnnnnnnnnnnnnnnnnnnnnnnnnnnnnnnnnnnnnnnnnnnnnnnnnnnnnnnnnnnnnnnnnnnnnnnnnnnnnnnnnnnnnnnnnnnnnnnnnnnnnnnnnnnnnnnnnnnnnnnnnnnnnnnnnnnnnnnnnnnnnnnnnnnnnnnnnnnnnnnnnnnnnnnnnnnnnnnnnnnnnnnnnnnnnnnnnnnnnnnnnnnnnnnnnnnnnnnnnnnnnnnnnnnnnnnnnnnnnnnnnnnnnnnnnnnnnnnnnnnnnnnnnnnnnnnnnnnnnnnnnnnnnntacaaatcttttttgcaggaaaacatgcctctaattcgcaacaggaagcccggagagcgattcttcgttatgcataaggccaattgtgtttcaacagtaaaaactgtttctgaggcttttggttgcgaatagtgggctattaacgcgtattcccgtaacgctgaaaagtaatgaatagctatgaatagcagtgaccttgcaggtaaacgtcaggtttattactattcaggcatcgatactgaccggaaccactcaacactggtatgttgatggggtattgatgtcggagagtaatctcccccagcctaagagcgggatatccaaagacacagaccggaacccaacaagagtggataacatcgatgatctactctggtgaaaaggcgctgatatcagcgcctttttgcttttctggacgtgtaaaccgtctgtccattcagtcgcagatgtgcgacatatgcaaatttcatgggcctactctttggtatggagtgtcgtccccactgattgacttcataagctgatacaacataaagctttaagccgttcgggtgaccgttgtccttacgcaagtcaaagaagatcgcatagtcatttacctccatataatgatacatctcattgtttcccttattgatatggggaacaacgtaggaggtcagaagatttgttgaaagcatctgcggcaggttaagactggcagcatatctgtcagcacagaaaaatcgatccggtggaatttccggtccgtttcctttctggtcagaaaagacatgattgctgtagttgattgttatctgtacggggtcagggatattggcgatttctgccataaacgtcaaaggcgcgaggtgcttcatacagtagctttttccattaaaggaaagatttttatgtgcgcctttcactgttatcccttacgaatccaatggagcgggaattgtatcacaaccccatgcggggcagatgcgcccgagatgtaaaagatgtgcatagagtacgcgcatggccggcctcactggctgttatcctgaagaggccaaccatggttactatgtctccctgtcagattttggcctgatttacccgtgcggacagtgcctgatgactttccttacgttcgctgtatcggtcagccagataatcagtctgccctttcaggagcagggtgatcttaaataattcctcggtgacgtcgacgatacggtcataccaggaagagggtttcatacgtccgttctcatcgaattcctgccatgctttggctactgatgattggttggggatagtgaacatcctcatccagcgtccaagaatacgcatctggttcacggcattaaaagactgcgagccgccacaaacctgcattaccgcaagggtttttccctgcgaagggcgaaccgcgccttcacttaacgggatccagtcgatttgtgccttcataaccgcgctcattgccccatgccgctccggcgagctccacaccatcccgtcacaccatctgaccaggccgcgtaattcggtgaccttagggtgcgtgtccggcgcatcatccgggaggggtaaaccggaggggttaaagagtttcacctccgcgcccatcgccgtcagcaggcgaccggcttcctccgcggcaaagcggctgtaggagcgttcccttactgagccatacaggatcagaatccgtggcggctcctgcaggtgcaggcgttcggcaatgtgttgatcaaagcattcagtattcagggcaggaaattgttccatttgtctcctccggagagaacagatgatttcaaaattaatacatatgatttaacatatgtgtattctaaagggaacggagtgaaaaatgctacaacctgttcagcttttcaaaatcctgtcggatgaaacccggctcgccatcgtcatgcttctccgggagtccggagaactgtgcgtctgcgatatctgtgcggccacctccgaatcgcagcccaaaatatcgcgacatatggctatcctgcgcgaggccgggctggtacttgaccgtcgggaaggcaaatggatccactatcgtctgtcaccccacataccggcatgggcagcagagacaatcatgacgtcctggcagtgtatgcgggaggatgtgcgtgaatggctggataaatcagcctgcacctcctgctgagaaagaaaaacacatttacataatcatatataacggagtctaagatgcttttggcagggagtatatttttgctgacgctggtattggtgatctggcaacccagaggcctgagtattggctggagcgcgagtatcggggctgtgctggcgctgggaaccggtgtcatccatatcgctgatattcccgttgtctggaatatcgtctggaacgcgacagcggcatttattgcggtcatcatcatcagcctgctgctcgatgagtccggcttctttgaatgggccgcactgcacgtctcccgctggggtaacggacgtggccgcttgctgttcacctggatagtcttgctcggtgccgctgtcgctgcgttgtttgccaatgatggcgccgcgctgatcctgacgccgattgtgattgcgatgctgctcgcactggggttcagccagggcacgacactggcctttgtcatggctgcaggatttattgcagatacggccagcctgccactcattgtttctaacctggttaatatcgtctcggcggacttcttcggtctgggctttacgcagtacgcctccgttatgatccccgtggatgcggcagcgattgcggccacgctgatcatgctgcatctcttcttccgcagggatattccggcaacgtatgacgtttcgctgctgaagacgcctgccagtgcgatcaaggatccggcaaccttcagggcgggctggattgtcctgttattgctgcttgtcggtttctttgttctggaaccgctggggatcccggtcagtgcgatagcggcggctggcgcagcagtgctgtttgtggtggcgaaaagaggccatgccatcaacaccgggaaagtcctgcgcggtgcgccatggcagatcgttattttctcgctgggcatgtacctcgtggtctatggcctgcgcaatgcagggctcacggagtacctgtctggcgtgctgaatctgctggaagacaaggggttatgggcagcgacgttcggcaccggcttcctgacggcatttctctcatcagtgatgaacaatatgccgacggtactgattggcgcgctgtcgattgacgggagtacggcgaccggcgtcgtcaaagaggcaatgatttatgccaatgtgattggctgcgatttaggcccgaaaatcaccccgattggcagtctggcaaccctgctgtggctgcatgtgcttgcccagaaaaatataaagattacctggggatattacttccgtaccggcattgttatgactgtgccggtgctgtttgtcactctggccgcgctggcgtggcggctctctgtcactttgtaatgagatactgatatgagcaacattaccatctatcacaacccggcctgtggcacctcacgcaacacgctggagatgatccgtaacagcggcaacgaaccaacgataatttattatctcgatacgcccccgacccacgatgagcttattaaacttatttcagatataggaattacggtacgtgcattgctgcgtaagaatgttgagccttatgagcaactgggacttgcagatgacaggtttaccgatgagcaactgatagaattaatgctgcagcatccaattcttatcaaccggccaattgttgtcacacctgtaggaacccgcctgtgcagaccttcagaggtggtactggaaattattccggaacctcagcagggtgcattcacgaaagaagatggcgaaaaggttattgatgaggcagggaagcgggtgaagtaataagcaacgaaatggataattcgattgcggaacacgttatttagctttaacagcaaacaaaaaagagcccatgtattccatggactctttctgagatgcctcgattattctgtccaacttttgggggtcagtacacccacgaggccacctgtatgcctagacaacatcaggatagcctcttagatgccgcgaggcaaggagaagaaggcctgtgttaacaccaagctgtaatgtcccctttgaaccattctaaaatgtccccagacaattctctgggggatttttcatgatcaaagagactgttacgatgagtcataaggaactcgaccgacttcacattattcaggagtcacttaatcgccatattactcaggaacaagctgcggcacgcattggcatttctattcggcaggttaaacgtctggtgcaacggtatagaaatgaagggccttctggtctagtttcccgccgacgtggaaagcgtcccaataattccttttctaccgaattcagagcaacagtaatttcactcctcaaaggccgctacgctgattttggacctacgcttgcgtgcgaaaaattgcgcgagatacacggcttgtgtttatccattgaaactctcaggaagtggatggtagaggagggcatatggcgcgaacgtcgtcgtaagtttgcccgaatttatcagcgccggatgcggcgcccatcctacggtgaactcatccagattgatggctcgcctcatgactggtttgaaggtcggggccccaaatgcacactgatagtctttatcgatgatgctaccagcgctctgatggcgctacgattcgctcctgcagaaacaacccgggcttacatggaaaccctccggggttaccttaatgatcatggcgtaccactggctctctattctgacagacacagtatattcagagtaaataacccggagcgggaaggagagttgactcagttcacacgtgcgataaagacactgggcatcgagccaatccatgccaacagcccgcaggcaaaagggcgggtagagcgtgccaatcagacactgcaggacaggctggtcaaagaaatgcggcttcagggtatcagtgatattgaaacagcaaacgcatggttgccgacctttattgaagcctataacaaccggtttgctacgccgcctcgtattgctgataacgcccatcttgatgtacaccattctgaagaggaactgggttatatcttcagcctccaggcgaagcgcgttctctccaaaaatctcactttccagtacaaaagcagtgcgtttcagattcgcagtgaaggccggggatatcgacttcggcattcggttgtcacggtatgcgaaagctttaacggtgaaattaaggttctgtatgatgggaaagcgttgggatgggaaaaatatgttgatggcccggagcctataccactggatgatgaaaaaagtgtccatgaacgtgtggataatgcccgttttgatttacgctcaaaattctacgtaaaacctaaagctgaccatccttggctcacgcgccgcacgcaaagtaatcagcaagtgaagccccctaaattacccagaaagaagactgatcccgataaaatggactgaaaccaggcgttattcagttgagtgcatatccagtcataggatagattcttacgtagcgtttctggcgtgcattttcgggtggtttgttactgtttttaacggggacacgtcagaaacgcgctcaggccgtctgagcggtacgcgtaaatgcgacgttatggtaaatagtctgaactaatgtcagcgaagagcggacgttggtagattacaattaacagctgtcgggtcacgagatgttttttttgattgttactcaaatacaattctctccgaagactgaggatacatcgaccatttatcataattgctgtggcagaaaggaatgtttttctgccacatacggggtcagtttacttttggaaagtccaccacggtgtcattcacacggttgaccatattcgtaaacagaatcgcactgactgcactgatgacttctactacctgtcgatcgctaaagcctgctgccagaaaacgactgacggtttcttctggtaaggtgttgcgggtcgtcaccagagtttttacaaatttgaccaatgcatcaatatgcggatcttccgggaactctccccggcgtaatgccttaatttgctcaacgctgtaacctgccattttcccggttaacgtatgcgccgccagacagtaatcacatcctgacacttcactgaccacaaggttaacggcttcaatttcctgtttattcagctggcttttcgccagcgtggcgttgtgtgacaatgcctgacccagaatgtcgggggcgatcccgatggtctggtaggcattcgggactttacccatcgctcgtttaatggcgctgaagagatctgcagtcttgccagtagcattttcaggttgtacggaagttaaacggctcatcattttttcctttcagtttagggtttcgccgtatcggccatgagcacataatagggcttaccaggcaggcaggtaggccgtatcgtctcgattatttgtcttatcgtctcaggagccagagtggacaacctcagtcgtttgctttccttatttactccagcatgtagcgttaatcttcactgccgttttgccgggcgctgggatgtcgaccacccgcaacaagccgccggtattgtgccctggcatgtcattcttcgtggcgaaacgcggctcattgttgaaggaaagacgttcgatgtgcgcgccggtgatatcattctgttcccgcacggatccccgcatttattgcaaagcctggtggactgggggcaggttgttcctgctcaggtcaacaataatggcattgtcactgatgtgtggacggaaggaccggggcctgcggttgaggtattgtgtggagagtttcatttcgggccgggttatcgctggatgttcgccgatgaaacggtactgatccatctccgtgccgatgagcaacacgattgccctgagctggaaacgctgctggtaatgctggtacgcgaaagtctgggtggtttaccgggcggtgcgagtatcgttaaggggctggcagatacgttgctcgcgctaatcctgcgtattttgctgtcgctgcacgagcctcctgcgggtgttttacggctactgagcgacaaacgtcttgctcctgccgttctggccgttatcgctgatcctgcattgccatggacgatggagtcgatggcgcaacgctgttttctctcacgcgccaccttcgcccgccacttttcacacagctatcatcagacgccccaagtctggctcaaccagttacgtatggtgttagcggcaagactgctttcagaagagaaaaatctgacagcagagagagtggctgaacagtgtggttttttgtctctgtcgtctttttctaaagcgttcaaaaaaacctatggcataacgcctgctctgcaccgtaaacgtgggtagagtgaaccatgccgtaaattaacgccctgcgcgaagcgactgaggtggaatgccatacccgcgaataaacacctcccgcatatgtcgtctgtcgcgaaaaccggactcgcgggcaatggcatccagtgataggcggctttgttcaatcattaatctggcagcctcaagtcggagtccttcaatggcttttgccggagatttacccgtctcctgacgaaaaaggcggctaagttggcgggcactgatatgtaccgcatctgccagcagttccaccgtcagtgttttgtgcagattattacgggcatattccagcgcagtttgcagacggtctgagcggggtgccagggcaagaatttctgaatgctgcgtctgaccgccggaacggcgctggttcattaccagacgatgtgccacagtacgggcaatgtctgcgccgagatctttctccaccatgccgagtgccatatccagcccggctgtcatgccagccgatgtccagatagtgtcatcaataataaaaatacgatcatcttcaagctgaatagtgggatgtcgcgaagccaggctgtgtgagtgtgcccagtgcgtagtggcgcgtttttgctccagcagcccggcctgtgccagtacaaatgccccggtgcagatcccggcaatccggcgcgtctggcgggcggtggcttgcagaaagtgaatgacacccgggctagccggttcatccactggcgataatacgcccgccaccagccaggtatccacctgcgtttcctcgctcaattttgccgagtctacaccaatacccgaagaagaacgtacagtcccaccgtgttcggagtagacctcgggttgataaaacggactttcagtcaccagattggcaaactcaaataccgtcagcgtagacagcgccagcatctggaaatggtcggcaatgatgagtcctaaacggtgcatctcaactcctttatgacaggtgaaccgcctgatatttcgcagaacgtgctcgtaaccattcagacgtccacagactggccagtgccagcagcaggaacaggactgagcttatcattactccgtaaaaccccgacagcggataaagccatgatgccaccgccgacccaaaaccaataccgcagaacataaaggcgctggttaacgccagcgaaattccacgcgtttccgcggtcgagatctccacaatacgtcgctgttgagtgggccataacaggtcagtggagaaggcccagaccaccagcaggatatacaacaatgacaactgagcaggtagcagaataataatcagcatatccgcaaccagtaaggtcagaccggcaaccagtaattgctctgcactgtagtggcgtgcggcgcgagtaacaaaaagattccccacaatacccgcaatgccgataacagccagcgctatcgatacggaagatatatccccctgccagcgatctcggataatcggagagataaaggcatacatatcgtatacaccggaggtgataaaaaagaccaccagaaaggctgtcagcgttttcccctctgtaagtacccgggcgacctgccgcaaatgaatatcggcacctttgacctcgttcggaaccagaatccacactcccgccgccgtcaccaggctgaccagtgtgacaagcatgaacagcaagcgagccccccaggcgctggctacccatgtcgcaagcggaataccgaccatgctggccatcgacaccccgagcagaatagtggcaatggcactgccacgctctttcggcgcgaccagctcagcgccgagcgcgaccagaactgggcctatcaacgatgcccccagccccatcacaatccgcgaagccaccagcagcttgtagtctggagcaatggcaaatataaaggccccgagcccaaataccagcatgcctgccagcacctgtgttctgcgcatcagcttgccgaacagtacctgcgccagcggtgcgcccagcgcaaatgtcagaccaaaaatagagagcaggcgggcactttgtgcatcgcttatcccccactcctgagaaatcgaacccaggctgcccgccacggaaagtgaacccgtcgcctgaataaaatacgccagacttagcgcccataacgcgcgcctttgagatgttgtcagatgattttgcatcataaactccagggatggggcagttacctgcccctgagtcggtcaggcaaccggaatggggttatctaccattgactgattaaacgcgttcaccatctcgtgttcgttcacacccggattcgcacgtgcagggagcacactatctacaatcacttcaatggaatctgtcgccagtttgtcaaaagtttgctggataaaatcagctaccggcatcgcacgggaatcaccgcttttgtagatcaaatcggtatcgacccaaggcggtgaaatctcgatcacattcacaccggcatcgcgcagtaaaaaacgctgcgacagggtataagaatgaatcgctgctttggttgctgagtagagtgcattcgtcaccaagggtaaaaaagccagaatcgaactgttgttgatcaataccgcatccggttgttgtttcaggtgctcaacaaaggctgaactgacccgaacagtgcccaacaggttcgtgtccagtaaggtggtggccatatcgtcatccagttcggcagctggattatcgaagggcataatgccagcgttattgatcaccacattcagggccggatagcgggagagcacctctttcgccgccgatttaatgctggatacatcggtgacatccagtaccacggaatccattcccggattggcggacgtaaccgtgtcaagaagagctttacgacggcctgaaatgatcacctgattacccatttgatgaaatttttctgccatctcgcggccaatacccgacgtgccgccagtgataaaaatagtgttgcttgtcagtttcatacggttattcctgttggctaaatacaaggctagtgagtaagtccggcacgataacggccggcgggtacattgctggagaggtgcgggatcatagcctggcgactactttccatcgcctgccagtaagcttcgttatgcagtgacgggatggtgacaaattccccgttaagaaaacccgtaagcgccgcgtccaccagatcgtaagcgctcattactattgacttatcgagttggtcaaggggtaaaccaccgttatcccagaacggcgttgctgtcgcgcccggcagcacggcctgaaaatggatgcccttttcagagagttcatgatgcagtgactgagtgaatgccagaacaaaggcttttgtgccgccgtacacgccgttaagcagttccggcgcaaggctgacaatcgatgagatattgatgatggcacccacacctcgcgcgacaaatccgggaaccacgctgtaagtcagacgggtcagagcaacgacattgagattaatcatcgcctgcatttgatcgacatcgctcgacaacaacggcgtatgagttccgacaccggcattgttcaccaggagagtaatgctggcatcggcacgcagttttttctccagagcagaaagctgttgggcatcacccagatcggttgccagcacttccacattgcgggcggtgtcagcagtgatgtgactcgccatctgatttaggcggttatgattacgggcgataatggtaaggtcgtatcccatgcgcgccagtcgactggcgtaaacggcaccgatgccggtggatgcaccagtgattacggcagtgcctttacccggttgtgttgcgacactcattgcagactcctttcgatcaccattgattcgatgagagaatcataagtgagaaagaaatgtcgtaaatgacaattatggtagttatttaggacattgcgtatttctgttcaagtaacgggcaggagagaaagtaactatcgggctgcggtttcatttcagacacataagactacttacggtgtgtagtaatgtccgctcctggcacggagcggaccagctaactgagctgaaggtccgctgtgagcgagaagcggaagttagggatccatgtttacatcgatgtgttctgaatcatatggaacnnnnnnnnnnnnnnnnnnnnnnnnnnnnnnnnnnnnnnnnnnnnnnnnnnnnnnnnnnnnnnnnnnnnnnnnnnnnnnnnnnnnnnnnnnnnnnnnnnnnnnnnnnnnnnnnnnnnnnnnnnnnnnnnnnnnnnnnnnnnnnnnnnnnnnnnnnnnnnnnnnnnnnnnnnnnnnnnnnnnnnnnnnnnnnnnnnnnnnnnnnnnnnnnnnnnnnnnnnnnnnnnnnnnnnnnnnnnnnnnnnnnnnnnnnnnnnnnnnnnnnnnnnnnnnnnnnnnnnnnnnnnnnnnnnnnnnnnnnnnnnnnnnnnnnnnnnnnnnnnnnnnnnnnnnnnnnnnnnnnnnnnnnnnnnnnnnnnnnnnnnnnnnnnnnnnnnnnnnnnnnnnnnnnnnnnnnnnnnnnnnnnnnnnnnnnnnnnnnnnnnnnnnnnnnnnnnnnnnnnnnnnnnnnnnnnnnnnnnnnnnnnnnnnnnnnnnnnnnnnnnnnnnnnnnnnnnnnnnnnnnnnnnnnnnnnnnnnnnnnnnnnnnnnnnnnnnnnnnnnnnnnnnnnnnnnnnnnnnnnnnnnnnnnnnnnnnnnnnnnnnnnnnnnnnnnnnnnnnnnnnnnnnnnnnnnnnnnnnnnnnnnnnnnnnnnnnnnnnnnnnnnnnnnnnnnnnnnnnnnnnnnnnnnnnnnnnnnnnnnnnnnnnnnnnnnnnnnnnnnnnnnnnnnnnnnnnnnnnnnnnnnnnnnnnnnnnnnnnnnnnnnnnnnnnnnnnnnnnnnnnnnnnnnnnnnnnnnnnnnnnnnnnnnnnnnnnnnnnnnnnnnnnnnnnnnnnnnnnnnnnnnnnnnnnnnnnnnnnnnnnnnnnnnnnnnnnnnnnnnnnnnnnnnnnnnnnnnnnnnnnnnnnnnnnnnnnnnnnnnnnnnnnnnnnnnnnnnnnnnnnnnnnnnnnnnnnnnnnnnnnnnnnnnnnnnnnnnnnnnnnnnnnnnnnnnnnnnnnnnnnnnnnnnnnnnnnnnnnnnnnnnnnnnnnnnnnnnnnnnnnnnnnnnnnnnnnnnnnnnnnnnnnnnnnnnnnnnnnnnnnnnnnnnnnnnnnnnnnnnnnnnnnnnnnnnnnnnnnnnnnnnnnnnnnnnnnnnnnnnnnnnnnnnnnnnnnnnnnnnnnnnnnnnnnnnnnnnnnnnnnnnnnnnnnnnnnnnnnnnnnnnnnnnnnnnnnnnnnnnnnnnnnnnnnnnnnnnnnnnnnnnnnnnnnnnnnnnnnnnnnnnnnnnnnnnnnnnnnnnnnnnnnnnnnnnnnnnnnnnnnnnnnnnnnnnnnnnnnnnnnnnnnnnnnnnnnnnnnnnnnnnnnnnnnnnnnnnnnnnnnnnnnnnnnnnnnnnnnnnnnnnnnnnnnnnnnnnnnnnnnnnnnnnnnnnngaacagatcacctgacgttcttgtttttcggttagtgtgatttatttctctaaatattcaatacgatagctgtatgcaaatctataaatagcaattggtttaatttatgttgtatttcagtttgtagaatagagactaaccaaatacataaggattgttctttacatgaaaacattagtaattgccaccaccattttaattggtacttttctaagcggttgctctgtgcaaaatgataaaacacagtttcaaggcctgggtctgacatatcagtccgatgtcaaaaaactggataatgggaactacctcactgaggtagaagctgctcctgctgcaggtcgtatacgaggcgctattggcactgcaacaaaaaaggcttcagatttctgtagggtacaaaataaatctatgaaagaagtcagaactgatattgatacacacttacttgttaatggcgttgctcgcctgacgtttaaatgcgtttaaatattcctacggtttatgatttttcataaaactaaggtggctgttgtgaaatatgttctctctgcgcatattcttacggccactaggtgataatatagttatcccctaaaaacgtccctttccctgttggagatattccgatattcacctatttataccaatacctccattcttcattaagggctaaggagcggtttgcttgagctagtagtaacgtccgttcctggcactaagcggactgtgatcacacttctgacgtctcgttttctgacttccttcgtggcttgccctaagcatgttgtagtgcgatacttgtaatgacatttgtatttacaagaggtgtgagacatgggtagcatcaacctgcgtattgacgatgaacttaaagcgcgttcttacgctgcgcttgaaaaaatgggtgtaactccctctgaggcacttcgcctcatgcttgaatatattgctgacaatgaacgtttgccgttcaaacagacactcctgagtgatgaggatgctgagctcgtggagatcgtgaaagaacgacttcgcaatcctaagccagtacgtgtgacgctggatgagctctgatggcatattttctggattttgacgagcgtgcactaaaggaatggcgaaagctgggctcgacggtacgtgaacagctaaaaaataagttggctgaagtgcttgagtcaccccgaattgatgcgaacaagcttcggggtatgcatgactgttacaaaattaagctccggtcttcaggctatcgtcttgtatatcaggtcatagacgagaaggttgtcgtctttgtgatttctgtcgggaaaagagagcgctcggaagtttatagcgaggcggtcaaacgcattctctgaaataaagcaggacatctctgtttcgcagtaaaggtgccatttctgctttgcgttgacaggagaagaaggccatgaaactgccgcgaaacaccctgctctggtgcgtattaatagtgtgtctcacactgctgatattcacttacctgacacggaaatcgctctgcgaaatccggtacagggacacggacagggaggtggcagcttttatggcttacgaatccgctaagtagctaaccccggcggggggaaacccccgccattcaggggctgagactgtgtggacatgcctgaagcgcctttatgaaggggttgccggttcgccggtagcccctttttccttcccgatgcgaccgcacgcctgaacttccgggaagggctgttcccctgcggggaacgggggaagggggacgcgccttcggcaccgtcnnnnnnnnnnnnnnnnnnnnnnnnnnnnnnnnnnnnnnnnnnnnnnnnnnnnnnnnnnnnnnnnnnnnnnnnnnnnnnnnnnnnnnnnnnnnnnnnnnnnnnnnnnnnnnnnnnnnnnnnnnnnnnnnnnnnnnnnnnnnnnnnnnnnnnnnnnnnnnnnnnnnnnnnnnnnnnnnnnnnnnnnnnnnnnnnnnnnnnnnnnnnnnnnnnnnnnnnnnnnnnnnnnnnnnnnnnnnnnnnnnnnnnnnnnnnnnnnnnnnnnnnnnnnnnnnnnnnnnnnnnnnnnnnnnnnnnnnnnnnnnnnnnnnnnnnnnnnnnnnnnnnnnnnnnnnnnnnnnnnnnnnnnnnnnnnnnnnnnnnnnnnnnnnnnnnnnnnnnnnnnnnnnnnnnnnnnnnnnnnnnnnnnnnnnnnnnnnnnnnnnnnnnnnnnnnnnnnnnnnnnnnnnnnnnnnnnnnnnnnnnnnnnnnnnnnnnnnnnnnnnnnnnnnnnnnnnnnnnnnnnnnnnnnnnnnnnnnnnnnnnnnnnnnnnnnnnnnnnnnnnnnnnnnnnnnnnnnnnnnnnnnnnnnnnnnnnnnnnnnnnnnnnnnnnnnnnnnnnnnnnnnnnnnnnnnnnnnnnnnnnnnnnnnnnnnnnnnnnnnnnnnnnnnnnnnnnnnnnnnnnnnnnnnnnnnnnnnnnnnnnnnnnnnnnnnnnnnnnnnnnnnnnnnnnnnnnnnnnnnnnnnnnnnnnnnnnnnnnnnnnnnnnnnnnnnnnnnnnnnnnnnnnnnnnnnnnnnnnnnnnnnnnnnnnnnnnnnnnnnnnnnnnnnnnnnnnnnnnnnnnnnnnnnnnnnnnnnnnnnnnnnnnnnnnnnnnnnnnnnnnnnnnnnnnnnnnnnnnnnnnnnnnnnnnnnnnnnnnnnnnnnnnnnnnnnnnnnnnnnnnnnnnnnnnnnnnnnnnnnnnnnnnnnnnnnnnnnnnnnnnnnnnnnnnnnnnnnnnnnnnnnnnnnnnnnnnnnnnnnnnnnnnnnnnnnnnnnnnnnnnnnnnnnnnnnnnnnnnnnnnnnnnnnnnnnnnnnnnnnnnnnnnnnnnnnnnnnnnnnnnnnnnnnnnnnnnnnnnnnnnnnnnnnnnnnnnnnnnnnnnnnnnnnnnnnnnnnnnnnnnnnnnnnnnnnnnnnnnnnnnnnnnnnnnnnnnnnnnnnnnnnnnnnnnnnnnnnnnnnnnnnnnnnnnnnnnnnnnnnnnnnnnnnnnnnnnnnnnnnnnnnnnnnnnnnnnnnnnnnnnnnnnnnnnnnnnnnnnnnnnnnnnnnnnnnnnnnnnnnnnnnnnnnnnnnnnnnnnnnnnnnnnnnnnnnnnnnnnnnnnnnnnnnnnnnnnnnnnnnnnnnnnnnnnnnnnnnnnnnnnnnnnnnnnnnnnnnnnnnnnnnnnnnnnnnnnnnnnnnnnnnnnnnnnnnnnnnnnnnnnnnnnnnnnnnnnnnnnnnnnnnnnnnnnnnnnnnnnnnnnnnnnnnnnnnnnnnnnnnnnnnnnnnnnnnnnnnnnnnnnnnnnnnnnnnnnnnnnnnnnnnnnnnnnnnnnnnnnnnnnnnnnnnnnnnnnnnnnnnnnnnnnnnnnnnnnnnnnnnnnnnnnnnnnnnnnnnnnnnnnnnnnnnnnnnnnnnnnnnnnnnnnnnnnnnnnnnnnnnnnnnnnnnnnnnnnnnnnnnnnnnnnnnnnnnnnnnnnnnnnnnnnnnnnnnnnnnnnnnnnnnnnnnnnnnnnnnnnnnnnnnnnnnnnnnnnnnnnnnnnnnnnnnnnnnnnnnnnnnnnnnnnnnnnnnnnnnnnnnnnnnnnnnnnnnnnnnnnnnnnnnnnnnnnnnnnnnnnnnnnnnnnnnnnnnnnnnnnnnnnnnnnnnnnnnnnnnnnnnnnnnnnnnnnnnnnnnnnnnnnnnnnnnnnnnnnnnnnnnnnnnnnnnnnnnnnnnnnnnnnnnnnnnnnnnnnnnnnnnnnnnnnnnnnnnnnnnnnnnnnnnnnnnnnnnnnnnnnnnnnnnnnnnnnnnnnnnnnnnnnnnnnnnnnnnnnnnnnnnnnnnnnnnnnnnnnnnnnnnnnnnnnnnnnnnnnnnnnnnnnnnnnnnnnnnnnnnnnnnnnnnnnnnnnnnnnnnnnnnnnnnnnnnnnnnnnnnnnnnnnnnnnnnnnnnnnnnnnnnnnnnnnnnnnnnnnnnnnnnnnnnnnnnnnnnnnnnnnnnnnnnnnnnnnnnnnnnnnnnnnnnnnnnnnnnnnnnnnnnnnnnnnnnnnnnnnnnnnnnnnnnnnnnnnnnnnnnnnnnnnnnnnnnnnnnnnnnnnnnnnnnnnnnnnnnnnnnnnnnnnnnnnnnnnnnnnnnnnnnnnnnnnnnnnnnnnnnnnnnntaccggaagatgtgattcaaacctcaccatgtcccagttcacggatctgttttgctgggtcctggcagcatcggaaggggagccacaaccggcaatttttacgccgccagagaatgccactgagctgacgttaataaatgacgaatgcccggattatatctctgtctggtttgtagatggtcgcccggtggcagctgcaatgccgctggataattttcaccgcgttatttcttcatctctaagtaaataatcaggagtaaataaaaatggtcagtttcgcaagccgttatcgtatgcctacctcgatccgtaaagaccgtccgctgactaatgatgaattacagcgcatcgttcccagcgcgttctcatcggataaacacgattcacgctctgaacgttatacgtatatcccgaccattaacattcttgatcgcttacgtgatgaaggttttcagccatattatgccactcagtcacgtacacgcgaccaggataaacgcgactttacaaagcatatgcttcgcctgcgccgtcatgaccagattaacggaaaagaagtaccggaaattattctgctgaatagccatgatggttcaagcagctataaaatgatccccggtatgttccgtcaggtttgcagtaatggtctggttgcatggaaggattttggtgaaatccgcgtaccccacaaaggggatattgtcgggcaggttattgaaggcgcttacacggtgctgaaaacattcgacgcggttgatgaaaatatagacctcatgaaaagcattcagctcactttgcctgagcagcgcctttttggtgcgaccgccctggaacttaaatacgatggaaaaccagcgccgattacaccggagcaaattattaaccctcgccgtgtgctcgacagaggccaggatttatggaccacgtttaacgtggtgcaggaaaatgtgatccgtgggggaattcgtggcagaacggaaaaagggaagatgaccagaacgcgggaagtcaccggaatagatggtgacatcaaattaaatcaggtgctctggaaaatggcggaggagtttgcaaaactgaaggcctgaaaattaagccgctcaacagagcggctttttactgcccgctatgtgacgatgctgtttctgcaattttaatatcatgctcctttcccgcagctggcgcgagacgttcagaaagtaacttttttctggccagtaatacacgatatatatttttgatgtcctgtgcataggccttgcgctgtacaatgagctttttgctcggtcccgtattatacatccccacgctgtcccagttttttccgtatgaccgaaagttgtgcgccagtacccatgctccagtataaacacagatacatggatcatttaacaggcgctcacgggtaatattgaagtttttaagtttaccgtaatgggaactgttcacctgcataccgcagacatcttccgttccattcctgtttgatccatttatcgcatccgctaccagatggctctctttaatcgaaattgacataagcagcagcggatcaatttggtaatctttcccggcctgatcaaagcacatctgcggagctgcgccagcagatagtgaaagagtcagtaaagcagcaggcagtaacgatattttcatggtttggccttttagcgaaataaacgggctctggagaggcgctttaaaaaataccccggcggatcgtcgtaatcaagtaaattcactacaaacgcgcgtgagcgctctcctgaagggatttaacacctgtccgaaataaacatgccagagcggtagacggtattaacatgccgctctttactaaccctttaaaacatcacaccccacgcaagacttcgtcttgcagattttttctttaaattcagtggcatgatgtgtgttttatttcgtaatttttgagtatgtgcgattaaggtgtgtggactgacacacattgcagtgcttaatcaggcactgcaatgtgtgctaatacagcactctgaagtgtggggattgtgtgtattcaattaatagagtaagttaaaagcagatagtgcctgaaccacacacatcatagtgcctaatgcacacacaccgtagtgcctgattagcacacatatttagggatgagtcatatataaaatcagttggttaccagaaccatgcaccacggatagctgttaaagttcgccattgcagtgccgcatcaggcactgcattagaacatcgagaaactattatgccaagaaagaacatttactttaaagacaaaattgaccgcgaaatacatgatattcttgaaatagagctacagaaaggggccgcctcttctgagatgaactactcttcgatagtcaacgaattagtacgccttgggctaatggtatacaaatcgaaagaagaaggaagctcatttgacctggatggttttaggcgcgaccttataaagaaagtctccgggtcacgagaaggtattatgattctgactgcccttgtctctgacatcttcgttactctcaaaggtcccgactctggcgtgaaactggaagagctcataaacaccaacatcagtgcaattaacgatgcggaagataaagccgaaaaagaccacttcctggcagggtaaaataacttctttggccggaacactccggccagaatcgatcactgagacggcttttcatcccagggaaggtcacttttctccacctcccttattttttccttcaggaacacctcgaactccatgcaaagaactttaagtgcctgcgcatcctcgttctggtcaagtaacctttccgtgaaataacccagcgtattcatcaggcgggtgagcatttcgtcattaagactacggttatgcaccttcgccattgccctgatttcatccgcaaggttctcaggaatacgcatgctatatccggttgttttgcccggaagcaaaattctttcaccctcacgccacatccacaattgctcttgcttgagcgggacattaacttccttcacagcatcaacggattcaccatcaagtaattttccaagccattcctcaaatctcaccgccagcgcaatgagcctctctccctccgctgttttaatcacaggcttacccggctgataattcagcgacaacaaaagcctggcaataatttcctcattcacactcctgttgccagctctggcacatattctcagctccataagcagattatccggagcgcgcaatcgccactccacagcttcacccggctggaacttacgtggacggccgcgaccatcccacattttctctttaactttcatagctatagatcccggaggccatttccatactttctggtcaacaaagcctactcacttacatattcggataaatctgaatgattccaaaaagtgtgacatgcatcacagttttttttttttttttagggtcatgggaaaattgcgcccgcgtaaacaagcacttacgcgaatcacttttgtttacttcggagaaaacaaacatgttaaccaaaggcagtgcccttaacgtcggtaagggatgggcggtagcgtctttattccgcaaagcacgcgaaaatcgccagactaaattttacttaaagtcagcaggcgcttttttaattgcacttatggtcactcacccggcattcgctggcggcaccgaccttctttcctcacagaacaccacggttaattccaccttcggttctggctcttcattgattaaatggttttacattgccgaaatcatcatgggcctgtttatttacatcaaggcccgctcaccgctggtattcgtcggtatcgtaatggcaatcatctttacccgtgtagccttcggcatcgcgagttaaacgatgagcggggaggaggataaatacaacttcccggaaacaatgaaccagcaggaccgctatttaggtttgccaattgatgagttaattgttaccgcaccccttattgttctgggggtgcttaacaacctgtcagttgaacttggcgttatagcgggaatcctctggttcatcgtcagatatctgaaaaaagggcaggggtcgtactggttacttaatttctgttactggcacctgccatcacttttattcaaagtaacctttcgccagatacctgattctagtttccggcactggagggcatagttttcatgaaactgaatattaaaggagagcgcgataaacaactccgctatgcgtttattggtctttcagctttaactttacttatgggggccggtaacgtactgacaggttcgcttgcatggtattttgccaccacccagaaaaccattaccacaccattaacatttaatcgccccttcacatcagattcaaaaggtgtcgatgccccaggcctgacacaattcgccgcctcctttatttactggcgactgaacgtcaccccggaaaacatcgacaacaaccagaaaatgattcttggattcgtcccttccgacgaacgggacgaactcaagaaagctctggacattgaagctgaacgcatcaggaaagcgggcatttccacccagttcgacacgaaagaaattcgcgtcatggatgatggctccgtgcagtacagcggagttctgaagtcctccaccactaacggcgtaatcatcacgccaatgaaagaccaggaaaaaacctaccgcctgaaactgagctatgagaacggtgtgattaacctccacagcttcgaagaactccagccggtatccaccaccaactgacaggactgcccatgaaatttcgtatttcaccggcagctgctgctgtgtttctggcagcgggattatttaccagcggcctccgggccgcttccgcacccgcagccattccgtttgagaacgacgccgcctttaacgtcactctcagcaacaccaatccgagcaaggttgttgtcgacggagaactcattaccagcatcagcggaccaaccggtgcctatgaccagagccagaccgacgacggagcacttattctgtctccacttgtcagccagaacttcacgctgtttattcagaccgaccgcggctcatccctgagccttaacatcaggccgcagccgggtaacggcaaaacactgcgcttcaccccaatgtcaccaccacttcgcaagaacgacgatgcgaaggcatgggaagaagggcagacctacgaaaaaacactggtcgcactgtcccgcgccgtagtcaacggtcaggtgccggacgactaccaggagtatccggtcagccgcatgcctgcatacacacccgccagtgatgtacgcctgacaccggaacgccagtttgttggtaaccacctgcgcgttgtgcgcttccggatgagcaacccgggcagcatcacccgcagcctgcgcgagcgcgatttctggcgcaagggcgtccgggccgtgatgctgtcgcagaaccagctttatgccggtggcgaaggctacgcctggattgtgttttcagatgacggagacacccgcccatgagtctgaataaaaacctgaaaacccggcgcaaacagctggccattcttgccgccgttatcgtgggaggcgccgccgccacgagcggcgttatctggtacgggcaacatcagcaggaacagaaacaccccgcgccggtcgccaccccaaacatgaccggcgtggtcacggcagcgtttaaccagcaggttaatgatgccgcactggcacagcagcaggccaagacgtccgcacttgaggacaagctcgccacgctcacccagcagtttgcacagaacaagctcaccaccgagcaacaactggccaaaaaggatgaagaaattcagcgcctgaatgaccagctaacgaaagcccccggcagcaacacgaccactggccagcagacaccacccgccggtcagaacggaacaccactccccggtcctgttgctgccggtcaggcccggccacccgaatacaccgtgaccccatcaggcacaccggccgccactggtgtgaatatggggcagggcgcagcgttctacccgggcggctctggccagagaatgacaggtgggttgagcaccacaaagttcagctatgaaagcctgaagaaaaagccaacaaaacttccctggattccgtcaggctccttctctgacgccatcatgattgaaggggccgacgccaacgccagtgttaccggccagcagaacacccagcccgtcaccatccgactgctgggcaatatccagatgccgaacaacaaagaatacagcgcagacggctgctttgtggtgggggaaatctggggtgacatctccagcgagcgcgggattgtccggacgaaatcactcagctgcgtactgaaaaacggcaagcacgtcgatatggagttcgatggccatgtcagctatcaggggaaaggcggcgttcgtggcaagccagtcatgcggaacggcatgattgtcggctacgccggtgcagctggcctcctgtcaggttttggtgaaggcatcaaatctgcggcaacaccatctgtcggcctcggtgccacagcggatgtcggtgccggcgacgtgtttaagcagggtataggcggcggagccagtaaggcggccgacacgctgagccagtactggattaagcgcgccgagcagtatcaccccgtgattgatatcggtgctggcaacctggtaactgtcgtgttccagaagggcttccgccttgaaaccctggaagacgctgaggacgctaaagcgaaagaggaactgcagaaagccggcaacgccgcgcagaacgccgtgactcctcaaccggcgagccagaccactgcatccagcaccacctcagtcggcaacatcaaccctgatgatgttctccgccaggccagccagctgcgtctgggtgacaccatcaactaaggagggcaaatgaatgatataggttccatgaggcgcgaaagcgaactaaagcgtatcgaagaggaccttaaccgctggatggctggaaaaaaaacaaagccccactggatattctgggtcgggacattaaccgctacagggatgttgattttcagcttctggtcaggcaatcaaaggcttactgtggtttcttttgcaataggaatggcattgattctggccgggttgctacagactggtgaaacatgggaagagaaaatacagaagaaaattcggtcatatgagccgcttgatattgatgccatgcgcaccctggccctctctgtttttcataaggatgagctgacgcagaaagaactcagaaagtggctggacgcggagttcagcgccatttctgatgccgctcttcgtgggggaagccggaatgcgtgacgaagagcgtaataacaacctgctcaggagcatgcggatgcatattgctgactgggaggctggtcggcccactccggcagcaagcaggtacatgttcttgggggttgccatctttctcggtgttggggggccggttctttcgtactacctctcactgtgggcgctggttttcctggttttctggctatttctgactcaatggatatgcaggcgaattgtcccccgctacaaccaaagctgggcgggggtgttcgacaggatgctttctgagtatgaacccttaaatcttcccgcctgggaacatcttaagcaccaggccgaaacggaggggctgacggtcagcattgtcagcaactggtatcaggaagaagtgaggaccgtctggccagaaaagaaacctgacctgaagttcctccataaagtcactgacggtaacgagaaaatcggagaggaatgaagcgtacgagagccattgcactactggtaataacagccggagcgaccggtgtttctgtttacaaccatactggagggctcacagtgttactcaccctgatgaccataggcgcacttgctcatgtcatcaacgtcttcctgtaattcatttcactggagtgtttatgtctgccaacatggcgcgctatccattactcaaaatcctgcacaactatcgctatatcctgattccagcactggtattcactatcgaactgacagtgtgggcagtgctcaatcttaaaggcgtgggtgatatgggctgggtctcctggcgagtgtgtctgctcttaagcttgttcctcgtatgctttagcgactcagcctttaacaaactcgatggtgggtttcttatgtatggttcagtcgttccgtggggcggaatgctgatagtggcgagtatttatggctttatccagatgaacctgaactttctgacgctggatttattttatgccggcgtgtttggcagccttgctgtgcagttggttttcactgtgattcagtgcaactgcaaataattgaaattgagtattacccctccctgaataccccttaaattaaaaccggagttaccccatgaaaaaactactgggtgctgcactgctgtgcagcgcactgaccggctgcgccggtctcaattctgatttcgactgcaacaagaccgcgaccgatcagtgcctgaccaccggtgaggccaacaagctggccgctcagggtaaaagtctggatgacctgacggcagagaaaaccgcaaaaaagcctgcgggtgaaaccctgccggcactgcgcaattcggcaccggtcgtgaatccgttccgtcctgtctccgtcgcagcaaccggaaccaccgccgccaggcctctgaccactgcgcccgcgaaaacatccggctcactggtcacgccgctggccacgccgagtcatgcgacccccgtgccggttaacacggcgggccgcgttccggttcagcgtattcctgacgccacgcagcgcctgtggattgccccctgggtggacacggacgacaactttcatcagccggctgtggttgagttcgtgaaaaacaaatcccactgggatgagagctaccgcgttatcggggagggcggggaatgagcagccattacgttaccggcaagaacggcatcgatcatctggcgaaatcgttagtccattcacggaaaggaacgacgcaaatcaccgccacacagtcagtcgataccgacgatgaaacgctggccgttctgagcgtgagctgtgactggcagattaaaacagccggtgatgcaccgctatccgggcaaatgaacgaagagaagctgcgtcgcctggagttaatccgggccgctgcggagggtcgaaaatgagttttgtcgacaacctgatggatatgctgaaaaacgggaaagaggaagacggtgccgccacggcccgcgagaatctttcccagacgtggggctacccgtccctggttgcggcactgccgtaccggtattacgacgacatcaatgagattttcgtcaacgccggctctgcaggcttcatcatggaagccgccccgctgcctggcgcgaacgaacaggtgatggccgcgctcgatgacatgctgcgcaaaaaactgccccgccagactcccgtcaccgtcatcatgctcgccagcaagtgtgtcggggaacgtatcgatcgcggtgtgagtaacgacatgtggaaaggagggatggccgatcacctcaataaaatcacccgcgcgttctggcagcgctctgcgctgcacggtctggccaacgaacgcgattacccgctttacctgcgtaactaccgtatctttcttgtctatggtcagccgctgaagcgcgcttcccagacacaacgggtgattgatgacctgattcagatccgcaacaccatccgcgtctccctgggcgctgcgcgcatcgacagcgtgaacgtcgatgtgaacggcttcctgtctgcggtacgcgagcagatgaactaccgccaggaacaggtgctgacgtcctcaggcgactacaacgaggatgaaaagctgaaccgccaggtggttgatcagggtatagggcttgatgtctatccgtcgcatctccggatgacgttgcccgagaccatcgacgcgcgcgggacacggttgccggcatcggcatgccgcatcatcaacatgcagcttgctaaaacgcctaaacgcttcgccctgtggcagggggctgacaatctgcagaacctgcgctttcctgacctcggaataccctgtccctttatgctgacctggacgacggagctggaggagcagacgaaaagccagagtgaggcatttcgtaaagataccgatttgtccaaaaaggccaactcagcctacgccgcactttttcccggcaccaaaagggccgcagaagaatggcgacgtacccgtgagcaactgaacaataacgaaattgcactctgcaacacgtactttaacctgaccctgttcgcgccggacaacactactgatgcacaggcctgtgagctggccgccgtgaacgtgttccgcaagaacgagctggagatggtaacgatacagtaccagcagatgcgtaactggctggccggcttcccgttcgtcatgcaggaagggatgtgggaagacctgaaaacaacaggcgcgacgctgcgcgccaagtcatggaacgcggtgagcctgatgccggtcgtggccgaacgccagttgtcgaatgtaggtatgccgctgccgacctaccgcaaccaggtcgcgttctacgacatgtttggcgaggagaatggcagtaccaacttcaacatcgcggttaccgggacgtccggggcaggtaaatcgtttctgatacagggggtgctgcgcgatgtactgaatgccggcggttacggctgggttattgacatgggggacagctacaaaaactactgtcatcaggccggtggggtttatctcgatggctctaaactgcgctttaacccgttcgccaacgtcaaagacatcaagcactctgctgaagggattgtgcgtctgctgacggtacttgccagcccgacgcagccgcttgatggcgtctgcgaggcgatcctacagaaagcggtaatggatgcgtgggagaaaaaggcaaacaaagcccgtatcgacgacgtccataattacctgactaacgaggatgtgaatcaggcgtttgcagacaagccgaccatcatctcgcgccttgctgagctggccatgctgctcgatacctactgcacctgggggccggacggagaatactttaacgccgacacccctacgctcgatggtgaaacccgcttcgcggtactggagctgctgagtctggaagacaagccgaagctgctctcctcgatcctgttctcgctcattctggcgattcaggaaaagatgtaccacagcccgcgcgacctcaaaaaagtctgcatcatcgacgaggcctggcgtctgctgggtggctccaacccgcacgcggcacggtttatcgaaaccggctaccgaaccgtgcgtcgtcaccgtggcgcgtttatcactatcacccagggcatcaaggacttcagcgccagtaaggaagcggaagccgcctggaacaacagttccaccaaaatcaccctgctgcaggatgctaaggcgtttaaacagtaccttgccgataacccggatcagttctcggacatggaaaaagaagttatccgtggcttccagccagccctgcagaccggctacagctccctgctgataaacgccggggaatacagctccttccaccgtctgttcgtcgaccccgtcacacgcgccatgttcagctcgcgtggtgaggactttgccttcatgcagaaattgcagagagaagccggggccactgcggaggaagctgcatatctgctggcggagaagaaattcggcaatgaacttcgtgaacttgaagaatgggtgaaagcagcatgagtgaacaacaggacaagccgtatgacgtcgataccgtcaacgatggtgcaactatcgccagcaaaacatcccgctgggttaaagccagcatgctggggctggcaggattgctggccatgacaggtgtggcatatgtgacggcgaaagccgtcacaccggaggtggtggtcttcgatatgaaggggacagtcgacctgttcatgcagcagtccgcgcaactgcagctcgatgaagacaaggccagggtgctgacaacgcgtttcaattcagcgctgtcagagagtctcggtgaatggcaggcctcacataacgccatcattctggttaaaccggcggtgatgagcgaccagcgggatatcacgaatgagatccgtgccgacattgcgcgccgcactcaggggggccagtgaaaagacgactaaagctgatgggtatgatgctgctgatgctttccgccggcagcggggcgaaagatctcggaacctggggcaacgtcttcgagcctgcagagcaggacatgctggcgtttatccagaatcgcctgaagggaatggagcagactggcgaacttgaccgtctgcgccaagaggcaacggaaagagtgaaggagcatgcagtacgtccgacgccggtggaagggctcacgaaagcgaaggaataccgcagctttgcctgggacccgacatttaccgtgaaggagaccatcactgacatgcagggcaacgtgatcgcccgaaagggcgatacggtcaatcctctggataaggtgcccttcagccaggtgctcttttttatcgacggcgatgataaggagcaggtgaactggacccgacagcagctcgccgatcagaccagcgtaaaggtcattctggtgaacggcaacatcaaagaaaccagtgatgcgcttaatgaacgtatctacttcgaccagtctggcgtactgacccgtaaattcggttttgaacacatccccgtgcggatatcgcgcgatggccgcgtgatgaaagtggaagaaattccggtatcaggagcgaaaaaatgagtgcaacaacgttaggtgacctgtttcccgaaatgcgtcaggcggttacatcccatcaccgttacgccagaaaaccgcgtaaacccgctgagataactcctcgcatgggaacagcagaacggctgaagacgctgtaccccgaaattgactcctggcatccggtactggtgaccaaagcctggctccactggtgtgagcagaaccagcaggacagccgggagccgtcgaaacgtgatgaacgtttcccggactacatcattcacctcttactggagaacatgcgggccgaggacagcgcgaaacgtaaaaagggccagacgctgtcactttccgagcgtctcgacaggttgtttgcaggtgaagggcaggagaacgccgaatgtcactgatacacaataccgctgcgccgtctgtgtctcagcacatgacaggtttcaatgctgataccaaaggcagtgaagaggaagtgaatcgcctctgtcagctgtaccctgaaatcgcttcatggcaaccggcgctgatcgccggtgcctggcatcagtggtgcgtggagaaccagattcagccgatggcgccggaaaaacgtgatgaagcgtttcccctgtacctcgtcaggcttatccgcaacagaatggaggagatgaacgcatggcgttaatcagctgcttcaccgaccctcaggggctgcaggggatgctcacctgtttgcgcgataccgagggcatgaccggtattctggtagtggttgcgctactcgctggctggattgtggttcagtacgtggcatgcgcccggcgtgagcgccgggcgcgggagagcaggccgggaatacccgtccccctcgcacaatttggtggtgcccgacatgccgatgcggttcatgcctttgctaaccgagaatactaccaggtattgctcgccgagctggaaaaaggcctgactgaggcgggctatgcactgacacgcgatgaatcactgcgcgtgacgattccagagactgatcggcaacaaatcagccgccggattttccgggcgcgccagaactatacgtcaccgagactatctgagcaggcgatgcaggacaacgaagatgcggcagtgaacgatggatacgccggctcgtggctcagcatactcatacgtggcagtgagcgcattggctggtacatcaccagaccggaaaacagccaatgatcaaccgcgctgccattcaggatgttcggtgctcactgcgttgcgctccgcctcagcctgaatgccatcccggtttccgattaacccccgaccaggtaacgccatgaaaaaagaccctgatactgaaaagggccggaatgtcaccatctcgtcagtacgtcacgatgagggttcggcccgacagctggatgaaatcctcaacgataacccgttgtacaaaccctctcacgtgctgcgcggagccattcttgccctgtacgaaatgagccaggaacaacgcctggccatcattatgaaagcggctgataaagccaaaaaccactgaccatttcttaagccctcccgccgtccggtggctgcggcactcccggagataccccatgactcaccctgaatctgtcaggccggtgacggttacccgtgaccgcaatggcttctggacgcaccctcattattttgcaccggccagtgatgaggtcacacagactgaatttggcgactggatgcgccagcacaatctgacctgtgccacccgctggatggaaaacgacgcgcctccccaggtgatcgccgactgggaaaaggggaaacaaaacatcagtgactggctcccttccgcgccagagggcgagggctggttcattggctccattcatgacactgaggacggcccggtctatgtatggctgcgggaggtgaaatgaagcacttttcatggctggccggtgtgttactggttcttatttcctgtatgccatcccaggcaacggccgcagccagtaacgccggtgacggccgctgggttaacccgataagcgatgtctgctggaagtgcctgtttccgatgacgctcggcaatattcagctggccgctggcccccaaaaggataccaacaacccggcttcgccgatccagatttgcccatatggtgtgttttaccgcatcggtctggccatcgggttctgggagccaatggcgatggtggatgtaacccgtgagccgggcgtcatggtcaacatggggggctttaaaatcgatctcgggcgaacgggaacgggaaccgcagggcagagtgaccgtcccgctgccggtaccttctaccatgtccactggtacaaatacccgctgattttctggctgaacatcatcaccagtctggggtgtctgcaaaccggcgacatggatatagcctatctctccgaagtcgatcctctctggaatgacagtacgctctcgatgctgataaaccccgaggcagcgctattcggcaacctgatagctcagggggcctgcgctgctgacgcagctgcttcatcagcgggtcttcctctgtcgccgctgttctggtgcgcgggaagtcaggggtctatctatccgctaaccggctataccagcggtgagttttctccgctcgaggcctctctgctggtcggagagcgaatggccttcaagatgcatcgtgaggggctggtctggaactctgtgggcgcggacgtcgccgtatgtaaccagtatccatccccgatcatcccgaaagagcgatggcgataccagatggtaaacatgtaccccgaaccgggtaactgccatcccttcggggccagcacgcagctctggggcacgacgcataactcgccatcctccaaaaagaacttcggctacctcttctggcgcaaacgtaactgcgtattcctttaaggacatgacaatgaaaaacgcttatctccgggcgctgacgatcagcgtcatgattgctttcgcgccgctggcactggcgagcgcccagaccgatatctccgtctccgaccatagctggatcaaaggtcagcaggatgcgctgacagcgatgaaggaagacctgcaggggcatccggcggccgcacccgtcttaccgcagcagcaactggacctgattaaccgcctgcagggcgatatcgcagcccggaccaacacgatgggggaaaaagacacgttcccggctatttactttgtgagcctcggtattccacgtgaaggtctgctgcccatgctgaaggatgcccgccgttacaacattccgccgacgctgcgcggtctggtgaataacgacatgcgacagaccgcggctgcaatgtttgagctgagtaaggaggacaaggacgctggcgtgcaaatcgatccaacgttgttcactcagtacaacatcaccacggtgcccgccctggtggtgacctgccctggccactatgacgtcatcaggggaagcctgcccctgcagcaggctctcgaaaaagtcgctgaaagtggtgattgtgcggcaacggcacgccatcttctggaggccggcaaatgaaaaaactgctttcaacggtgctgatgctttttccgcttctggctggcgcagctgatcctgcctttgaggcgggagcgagctttggcaaaggcaatgcttccgccgggacgggagccctgaagaacccggataccgtcacgggggcaataccaggctataccgctaatccaccagagaaagggtattacggcggcgtggatggcggagacggcgggctggccaacaaagggcaggctgctctgcagggcaatgacgcagcgcagtcggttatcaacgccggaaaaacgaacccgacgcccgccatcgacccgaacgcacctttcatcacaatcggtaaaaatgcggagagtacggcagacgggatcatgaatggcaccagtcagcagtgtaaggagacgacggtatcaaaatcgacgtttgagaactttacctgcgatcgggatatggccaccatccagacgtgcggaagaacagccagtatcaccgggcattatgaggataactacagctataagaccatcaccatagattcagacaatctggacgtcagcagcccgcaagtgtcctacagcatgccggaaggaacggtgtattcagcgacgatgaattacacgttcaagaaaaatttagcgttcagcaacgatctctggttcctgaacattacggctctcggttcgctgatgacgatgtaccagacctccgggtcgtatgacctgcctccgggtaagagttttaccgaaggagagaagctgactatcacgtttaataacaaaagaaacgtacccgaaagggttgccagcatttgggagaccggaaaaaccaaccacatgtaccattttgttatcaccatcgtttaccgtaccggcactaaggtttgggttccgcagacgacctggactgaaagctgtggttttgacaaaaaatcggccctgtccagcgcaggcagtatctgtaccgaaccaggcggcactcgtaccatcactgtcgacgggaaggagtacagccagacaaacagttgctgggcatattcagattcttatgtgacgggtaccagttctcgcgggaactgcggttcgctgatggataaccccgcctgcacgctctcttcccattcctgtacaacaactgagtcgggcatctgtacccatcagtcagaaacgtatcagtgtcagaaaacctggtcatccagcggtctggtctgcggcggggagtatatatgtcagtccggtgcctgcgatgagacgaacggtaccggtgataacgggtttgatacggctgtggccaaactcgcgggcctggcctctgcggcagaagatgtcagggatcagaacagcactatagatgtcagggccttcacgggtaaggccatgagctgccgtaaggcgtttgcaggcttctccaactgctgcaaggattccggctggggacaggatacggggcttgccgcctgtaacgatgatgaattagctctcgggaaggctaaagccaaaaagatcaccgtcagcgtcggcgatcgctgtgaccgtcaggtgctgggtgcctgcatccagaaaagtcaggtctactgcgtctttgacggtaagcttgcccgcatcattcaggagcaggggcgtcgcgaccagctgggcgttaagttcggcagcggtgacagtccggactgccgggggatcacggtcccggagctgcagagcatcgacttcgacaaaatcaacttctctgacttctacgaggatttgatgaagaaccagaaaatccccgataccagcacgcaggtccagcagattaaggagcgcatcgccgcgcaggtgaaccagcagggaggtggtaaatgaagcgtgtcctctgtggcctgctcatggcgctggcgagccatacggtagtggccgaggagattgtaacgcctgcagagcctttcaccggctggtcctggtacaacgaaccgaaaaagccgccggagcagtccagaaagccacaacagcctgcaccgcaggccattccggacctcagcaaaatgtccccgatggagcaggcccgggtactgaaagggtacacacaggaggcgcttaatcgcgccatcctgtacccctcgcgggaaaacacggcgacgttcctgcgctggcagaggttctggaccgatcgggcatcgatgttcagccagtcctttgcggcggcgcagctgagccacccggatctcgactacaacctggagtatccgcactacaacagcatggcgccgtttatgcagacccgcgaccagcagacgcggcagagcgccgtggagcagctggcgcaacagtacggtctgttctacttctaccggggcagtgacccgattgacgtgcagatggcgggcgtggtggcggactttgcgaaaaccaacgggatttcgcttatcccggtatcggttgacggtcaggtggcagcctccctgccgcagagccgtccggatacggggcagtcccggtcgatgaatatcacgcacttcccggcgctctaccttgttgacccccggagcaagaattaccgcgcgctgtcttacggcttcatgacgcaggatgatctgtcgaagcgattcctgaacgtggccaccggctttaaaccgaattcctgagagtttcttatgacaaaaatgcttttacccctcatccgtgatgcagggcgttttgccctgttcacccttgtcttcggcccggcgctgttgctgtacggtattgtgatagccatatcgctggagggctcgctggccgggcagtttgtgaaagaggcgcaaacgctaaccgaaggcgcgcccgacggtaaggtaatgcagtgcgttacgcattatgaaccggcaccacgaccccggctacctgaacccggcgaggaggccagtcctccttcttatcagctcccgccgatgtcgatttgccatcgtgaaccggttgacagcgaacgctggacaaagccgatggatgccacgcttttcaacttatggctgatagctgcgctcttcggcgcaactctgggttttcnnnnnnnnnnnnnnnnnnnnnnnnnnnnnnnnnnnnnnnnnnnnnnnnnnnnnnnnnnnnnnnnnnnnnnnnnnnnnnnnnnnnnnnnnnnnnnnnnnnnnnnnnnnnnnnnnnnnnnnnnnnnnnnnnnnnnnnnnnnnnnnnnnnnnnnnnnnnnnnnnnnnnnnnnnnnnnnnnnnnnnnnnnnnnnnnnnnnnnnnnnnnnnnnnnnnnnnnnnnnnnnnnnnnnnnnnnnnnnnnnnnnnnnnnnnnnnnnnnnnnnnnnnnnnnnnnnnnnnnnnnnnnnnnnnnnnnnnnnnnnnnnnnnnnnnnnnnnnnnnnnnnnnnnnnnnnnnnnnnnnnnnnnnnnnnnnnnnnnnnnnnnnnnnnnnnnnnnnnnnnnnnnnnnnnnnnnnnnnnnnnnnnnnnnnnnnnnnnnnnnnnnnnnnnnnnnnnnnnnnnnnnnnnnnnnnnnnnnnnnnnnnnnnnnnnnnnnnnnnnnnnnnnnnnnnnnnnnnnnnnnnnnnnnnnnnnnnnnnnnnnnnnnnnnnnnnnnnnnnnnnnnnnnnnnnnnnnnnnnnnnnnnnnnnnnnnnnnnnnnnnnnnnnnnnnnnnnnnnnnnnnnnnnnnnnnnnnnnnnnnnnnnnnnnnnnnnnnnnnnnnnnnnnnnnnnnnnnnnnnnnnnnnnnnnnnnnnnnnnnnnnnnnnnnnnnnnnnnnnnnnnnnnnnnnnnnnnnnnnnnnnnnnnnnnnnnnnnnnnnnnnnnnnnnnnnnnnnnnnnnnnnnnnnnnnnnnnnnnnnnnnnnnnnnnnnnnnnnnnnnnnnnnnnnnnnnnnnnnnnnnnnnnnnnnnnnnnnnnnnnnnnnnnnnnnnnnnnnnnnnnnnnnnnnnnnnnnnnnnnnnnnnnnnnnnnnnnnnnnnnnnnnnnnnnnnnnnnnnnnnnnnnnnnnnnnnnnnnnnnnnnnnnnnnnnnnnnnnnnnnnnnnnnnnnnnnnnnnnnnnnnnnnnnnnnnnnnnnnnnnnnnnnnnnnnnnnnnnnnnnnnnnnnnnnnnnnnnnnnnnnnnnnnnnnnnnnnnnnnnnnnnnnnnnnnnnnnnnnnnnnnnnnnnnnnnnnnnnnnnnnnnnnnnnnnnnnnnnnnnnnnnnnnnnnnnnnnnnnnnnnnnnnnnnnnnnnnnnnnnnnnnnnnnnnnnnnnnnnnnnnnnnnnnnnnnnnnnnnnnnnnnnnnnnnnnnnnnnnnnnnnnnnnnnnnnnnnnnnnnnnnnnnnnnnnnnnnnnnnnnnnnnnnnnnnnnnnnnnnnnnnnnnnnnnnnnnnnnnnnnnnnnnnnnnnnnnnnnnnnnnnnnnnnnnnnnnnnnnnnnnnnnnnnnnnnnnnnnnnnnnnnnnnnnnnnnnnnnnnnnnnnnnnnnnnnnnnnnnnnnnnnnnnnnnnnnnnnnnnnnnnnnnnnnnnnnnnnnnnnnnnnnnnnnnnnnnnnnnnnnnnnnnnnnnnnnnnnnnnnnnnnnnnnnnnnnnnnnnnnnnnnnnnnnnnnnnnnnnnnnnnnnnnnnnnnnagtatctcctgtgggcgatcatgagtggtctgtttgcagtactggtactgcactgcattctgtgctgtgtgggcaaacttgaggaatccctgtaccgccggataacccgaaaagacagcggcttggagcctgagagaacagaggtgccccatgattaaggcactgataacggcaggcgctgtctttctggctgggctggttgcactgccggcgaaggcggacgtcaacggcgacctgaacggtttcttcaataatctgggctacagcggcaacgtgactcaggcgcaggcctggcaggggcaggcggcagggtacttctccggcggctcggtatacctccggaaccctgtaaaaaacgtccagctgatctcgatgcagctgccttcccttaacgccggctgcggcggtatcgatgcctatctcgggtcgttcagtatgatcagcggcgaggaaatccagcgattcgtgaagcaaatcatgagcaacgccgcaggctatgctttcgacctggccctgcagacgatggtaccggagctgaagcaggctaaagacttcctgcagaaactggccagcgatgttaactccatgaacatgagttcatgccaggctgctcagggcatcatcggcgggttgtggccagtgacgcaggtctcccagcagaaaatctgccaggacattgccggcgaaaccaacatgttctccgactgggcagcttcccgtcagggctgtaccgtcggaggacagggcgacaaagtcacggctaaagccggtgatgctgagaaggatcaggtgctgaagaacaaaaaccttatctgggacaccctcagtaagaatggacttctcggcaatgaccgcgcgctgaaggagctggtcatgagtaccgtcggctccatcattttcaacaagaatggcgatgtgacaattctgacgccactggttgataaccgcgacctgattaaagtcctgatgcgcgggggaacggcgaaggtctacggatgtgacgaatccgacctctgcctgggacctgttgtcaccaatctgacgatttctgagtccaacgctctggtcactctggttaaaaacctgatgctctcaatgcagaacaagctggtcgacgatactgcgctgaccgatcaggaaaaaggctttgtgaacaccacctctgtaccggtgctgaagtatctgactaacgcccagagtatggggatgagcgccacgtaccttctgcaggtttccgacttcattgcccaggacctgatgattcagtacctccaggagctggtgaaacaggcaagcctgtctctggctggcaagaacttccctgaagaagctgccgcaaaactacgcgacaacattattcatgcgcagggacttctcgccgacatgaagctgcagtccgcagctgatcagaacgcgctggacggtatcgaccgcaacatgcagtacctgcagcagcaggtatccaccattgtttcaggctcctatcaaagcaactatcactggggtgatcgctgatgcttgagatatacaccatttatggcgggggaatgtggaaaacggcgctggacgccgtagtcacccttgtcggtcagaatactttccacacattaatgcgtattgccggcaccttcggggtgctggccgtactgctcactttcatcaaacaacgtaacccgatggttttcgtccagtggctggcggtcttcatgatcctgacatccatcctgctggtaccgaaacgctcagtgcaggtcattgacctctctgatccgggtgcggtctgggtcaccgataacgtaccggttggcctggcggctatcgcgtctcttacgaccagtatcgggtacaagatggcgtcgatttacgacatgctgatggccagacccgactcggtgacctacagcaaaaccgggatgctgtttggctcgcagattgtggcagaaaccagtgacttcgctacgcaaaacccagagctggctcagatgctgccggattacgtggaaaactgtgtgatcggcgacattcttctgaatggtaaatacaccatcaatcagctgctcaattctactgacccgctgacgctgataaccagtaacccaagcccgctgcggggcatctttaagatgacctccacttcacgccagttcctgacctgtcagcaggccgcaacggagatacagaagctggctaataccgacgtcaacccgggcagtgcgacgtttacctggctgacgagaaaggtcttcggcaacaagctgaatggcgcgacgcttctggccaacgctatgggggaaagctacggatatttttattccggtggtatgactgctgcgcagatcatgaagaacaacatcacgaacagtgcagttaggcagggtattaaaggttttgccgctcgctcatcagacacggctaacctgcttaatctggccaccgagaacgcggctaccaaacagcgtcttgcctgggctgcaggcaatgagctggccacccgcacgctgccgtttgcacagtctctgctgatgcttatcctggtttgcctgttcccgctgatgattgcgctggccgcgtcaaaccacacgctttttggcctgaacaccctgaaaatatacgtttccgggtttatctatttccagatgtggccggtgatgttcgccattcttaactatgccgccaactactggctgcagagtcagtccgggggcacgcctctggttctggccaacaaggatgttgtggcactgcagcattcggacgtggcgaatctggcaggttatctgtccctttccattccggtgctgtcgttctatttgaccaagggggctgcggcaatgggctctcaggtggcaggaagtgtactcagctcgggcgccttcacgtcagcaggtgtggcagcgaccacagcggacggaaactggtcgtttaacaacatgtcgatggacaatgtcagccagaacaagatggataccaacctgatgcagcgtcagggtcagcaaacctggcaggcggataacggctccacgcagactcagacggccggtggccatacggttatcgacggctcgggtgcaatgtcgaatctgccggtgaacatgaagctcagccagctggccagcagtggtttccaggagtctgcccgccagtcgcaggttcaggcgcagactgcactcgatggttacaaccacagtgttaccagtggctggtcgcagctctcccagctttctcatcagaccggtaccagtgacagcctgaaccaaggcagtgaaaacagccaggccactaatgcgacacgcggagctggcatgatgttgtctgcctctgagagttatgcgaaagcaaacaacatctcgacacaggaagcctataacaaactgatggatatcagtaatcaggggtctctgtctgcaggcattaaagggacggccggaggcggacttaatctgggcgttgttaaatttggcgctgaaggaagtgtttctggcgatttgcgacattcgacgggcagttcaagaggcgttcaggattcgggatcccaaactcaagattctcgacatgatcagaacagccaggctgttaatgacttccgtcagggtatggatatggttaaaagcagccgtatcaccgatggcgcgaatcattccgagaatgctgcaagcagcaatgttcagcagctggccgcaacgctcaatgatgctgaaagccagtaccatcagtacaccaccagttctacacagagtaacgagttcagccgtatggccaccgttgcgcagaaccagagcgcaagcctcgatacgaactatacacaggagtttgtggactgggcggccaataaatacggcgataaggcacagtccatgttgacaagtgcgccgtcggcgcgcgaagcggcgatggagttcgtaaatgaacggctcaaaccagaaatcatgggggattatcagaagggacgttcagatcttaccagcggtcaggagcatgcggcattcagtggggagcatatcgttcagccagcgcgtggcagtcaacaggtatcaggttcatctggtcatgatgcaggagtcagttacagctctcaggatggcggtgctcatagatcgggaggtgttggcagtgcccagacttacggaacggctcagggcgctgaatatggaggccagcagggtgggaattattctgccagaacagacgattctgtttcgccgggtatggagcagtcaactgttcatcaaggacaagcagccggacagagaagcagctcgggtaatatcatctcgtcggcaggcatggctgttgccggtggacgctccactgcagatgaaagaaccggccacattgcagaatctcaccaggagttccatcattcaggagccgtcagggagcaaggaagcatgcatggtcaggagagtgaagttactcatagccgttcaggcattaatgctggcggagaaaaagtacgtggcgatgctatgcaggagtcatatagagaaaatcaggctaagttgcatgaacattcctcgcagggttttggtcctcagaatgagttacagcgccgagtggcggaacaaagatctgaaaatgagcataaaatcaacgaatctgctggagaaattggcaaaaaacaatccactgttcaggcatccagtgatatcctgaaaggagagaatttaaatgcaaccggtaatttcaaaattcaacgaaaagaagccgaaattgaccagcaaacgccagttatagacagtgctgaaaaaaggaagttagaagagcaattgctggaattgaggaaaagggccagctaggaggataaatgctaaaggctaatctatgcagaatttcgttcattcctgtatttagtatatatgctgctattccaatcattcatgatgtgatgcctaaccataacaggtattacagtgaggattggattgcattggcagggatgtacgtgttaggtacattgatatccttaccattgttctatcttcttaaaaaagcggataagagtggcagtggcgtttcaatcgcctcgctctttcctcgcttgcttacttcaattctagcgcaagtaatatgcctctatttcctttgggaaaattcaatatatctatatctgtcgatgtccacagttatggttctttccgcagtgttatttggggcaggaaggaaggggttaaacctcttgaaggataaagatacaggcaatatctatgaaatacgcgggagtaaagcgtatagactctcagatgaagaggccgttagatatcaaacaagtatgtctggcaaaggaatagcattggctgagttttcatcgagccaatattcagggctagacacaaactcatctgttctacctatcaatttcggtccgagtcatacggatatcaatcaggggattgctataaatccttcgtcaggaatgccaatggttggcggcatctctggcctggatatacacgggaacagttggggaacaaacttcaacgaaccttcaaatacgtatgaccctaaccggggatactgagagtaagggggcaatggcccccttaatttttgtagtaatctaagcaaaccatctatttaacctaaattccctttcaaatcagccgataacgtctctgttagctatatctcgctaacggggacgtttttctatgcacaggaagaattcatgaaattaaaacaattagccgttgtaggtttgatcgcttctactcttgcactgtcaggttgtggtgccatgtccactgcggtgaagaagcgtaatctcgatgtcaaaactcagatgagtgaaaccatctggctggagccatcatcagagaaaacggtttatcttcagatccgtaatacctctgacaaggacatgtctggtctgcaggcacaaattacaaatgaactggccgccaaaggctaccgcgtcaccagttctcctgacgccgcctactactggattcaggcaaacgtattgaaagccgagaaaatggatctgcgtgatgcacagggcttcctcaagaccgggtatgaaggtgcggcaatgggggcggcactgggcgcgggtattacggcgtataactcatcttctgctggcgcaacgctgggtgtaggtctggccacagggctgattggtatggctgctgatgctatggtggaagacgttaactacacgatggtgaccgatctgcaaatctccgagcgcagcaaagtagccgtcacgaccgacaatattgcggctctgaagcagggaacgtcaggcgtcaagctgcagaccagcactgagcagggcaaccgtgccaaataccagacccgcgtggtatccaacgccaacaaggtgaacctcaagtttgaagaggctaagccagttctggaagcacagctggccaaatccatcgccggcattatgtaactgcattggcggtcaaagaccgcccgtttaccaaaataaggaatcagcatgaaaaaagcaggaattgtgtgtttatcactggtcgtggctgtactcacaggatgttcctccccaaaatctaccccggaagaaccagaaatgacagctgcacgccagtgctctgatcaggtgctcaccgcttcaaaaaataaagcgggtacaacgaagttaacgtcaatcatgaaagatgaagctacgattgttcgggttggtgattcttctcaggaaacccatcttatcaagggattcccttacgttgagtccacgtctcttgataacggtaagccgggttcaacatggcgcaactgcatgcaggcgaaagggtttactgttggtggttgagccgcctgcaacaatagtgagctaatagctcgttatcattaaaaccgcactgaaaagatatcccacatctcagtgcggtaattattacatctcctttccaactgacaccagaccgagttcatttcgggcagggtgcgtcagtgctttctgtcagttaccagtgattacgcttcctcgcatgactgcgcctggcgcagccctgcctgcggcgagcgtcgcgtccttaatttcaaggagttcgtccatcatgatgcatcagagaaatgaacgtgcagattactcagctgaattctggtcacttatccatctggaaagcgagctgatggcagcaagggcctggatgaatgtattcggttcacttcctgaggggcagggtatgaccattgttgctttctgggctggctatgaatttaccctttacgatctggagccccgggggtggcattcagcggtttatagggatgtggcctcgtcagtccgttctgtggctgcatacattaataaacaggactgggaggacggatgtcagcaggccaggtatgaactgagtcagatgtaataacctgacgattaacccccacgcggtaccacattttttcatcacccttttcaacgtttcttctctgataacacacatcaccgagcaggtgatgcgataacggccggacaacacgctatgagcttcgcaggaaaaaacctcacccagggcgggcagatgaccgcctaccgctggcgcatgttcattcaggtgaacaactggataggattctggatcttcatcctgttcgccgtactgactaccgccatctttctctggcgaatccctcaggaagccctggataacggttccctgtggtggttcgccagtatcaacagcagctttattgacctgatgccggcatcgggaacgccaaaaatctacgacgtccactactggtatgcgccaacggcgacggcaatggtgctcaaaatgaccctgccgcagatttataccgacccgtacatgcaggcgatgggcgaccagtgcctgcgtgagctgcagtgggcagccggtggcagcgggctgttctgtatggtggtgtttatcgccgtgacctggtttatcgccaatatcggcagaaaggaaagtgaagatgaatacatttccgggatgcagctgactgataagccagctgaagtgaacaagctcctgcgtaaaaacggtgagttctctgacctgcgcgtgggtgatctgcatatggtcaggatggcggaggtactcaacttcctgatgcatggcactatcggggtggggaagtcgacgctgatacgctggttactcgactacatccgcaaacgcggtgaccgggccatcatctacgactcaggttgtaccttcacagaaacccactataacccgtctaccgatattatccttaacgcccacgacgagcgatgtgccaactggcagatgtggggtgagtgcgttgacgcggtcgattacgacaacctggccgccagcctcattccggtagaaggggaatccgatccgttctgggtatccagctcgagaaccatttatgccgaccttgcaattcgtatgtcaacggacccggaacggagcattgagaagttcctcaaaaccctgctgtccctcagcatgaaaaatctgcgtgactatctggccaacacgccctcagccaacctggttgaggagaagatcgagaaaacggccatttccattcgctcagtggtaaccaactacgccaaagcccttcgctatctgcaggggctggatgacggcaccaggccgccgttcaccatccgggagtggatgacgcaggagcgctatgacagcagctggctgtttatttcaacacaggcccgtcaccgcaagagtgtacgcccgctgatctcactgtgggtatctctggccacgctgatgctgcagagcatgggagagaacagcgaccgccgcgtatggttcattatcgatgaagcccccagcctgcagcgcatccccgagctggccgagacgcttgccgaggcgcgtaagtttggcggatgtttcgtgctggggatgcagaacatggcccagctggttcacgtctacggccgcgagctggccaaaagtatcttcgacctgatgaacacccgtatgtacggccgctcaccgagtgcggagatggccaaagtggtggaagaggagctgggcaaccagcgtaagcgcaaaatccgcgagcagaacagctacggtctggaccaggtgcgtgacggtgtgtccctcggtaaggacgaggtcaataacccgattgtcgactacgagcagatcatgcgtctgccgaacctcaacttttatgtgcgcctcccgggggagtatccggtcgtccgtctgaagctgaaatatcgcgcgctgaagaaacggcaggcaggcctcattgagcgcaatatccgcgatgcgctcagtccggagcttgagagggttattcaggagaacgagcgcgcagcggcagctgccggtctgacgttcccgaccggtgaagaagtgctggagaagggaagcgaaatgtcagccgcagctgacggtacggctcatgttgcttctgccggtacgccggcatcatcgcccgtcgaaaaaaagacagcaacaccagagacagcgccgaagcctcctcagggcacagtgcctgaacggaaacaggttgctgtcatggagcctgttatctccggttctgcgacagtcgtaccggaagaggggggcggaaaacacaacacggtgacacctcctgtcattgcagagaaaaaagataacgttgtttctctccgttctgttggcgcaatgaaaaaaccgactgaagcaccgggcaaattaccggtctctcccggagtgaccggtcacccgggtaccgctgactctgtacaaacaatgcccgatgccctcaaggccctgcgaaaccgacatcatgtaccggaaccacctgtcgcctcacctctgagcatgctgcacagggcacgccagcggccggcctcttcggaaagcgatccgcagacagaggaaaacggcggtgagtccatgaacctcgacatgaaagtgacggcactgcctgacggcggcctgagtgtgacgacggcagggaagccagtgacaccgaaaaccccggatgaagcccacggtactcaccggcagctggcgcaggaagaagagaacattttaattcaccgtcacgcggacgacccgggttacgacgaaaacgaccattactattacgacagagagcctgaattatgatgtcagtcgccccagtagcgtcagccggcgaggctgcaggctactacagcaattccgataactactattttctgggcagccttcagagcctctggatgggggaaggtgcaaaagcgctgggccttgagggcaatgtccgtggcgatgatctcacggccgtcctcgagggccgcctgccggacggctcacggcttggcaaggaggttaacggacagcacgtccaccgtcccggccatgacctgaccttttccgcccccaaaagcgtgtccattctggcacttatcggcaacgataaagaaatggtggaagcacataaccacgcggtccgtgtggcggccggctatgtggagaagctcatctcggcccgcgacacgaaagacggcgtcacgtccatcgtacacaccggcaagatggtggcagctgcttacacgcatgacacgtcacgtaatcttgacccgcagctgcacacccatctcctgattgccaacatgacggagtatacgggcaaatggaaagccctggccacggactatatccataacgcgggctttatcgaaaccgtcatgaagcatcaggtcacgcttgggaaaatttatcgcagcgcgctgcgtgagcgggttgaagcgctcggccatgaagtggaagaagtaggcaagcatggcatgtgggagattaagggcgttccggaagacgtcagggacgaatattcctcccggggcagggaaattcagggtgccgtgggggctgaagccacgctgcgcagccgggatgtggccgccaaagacacccgcagggcgaaagtcgacccttcgaggatgcgcctgatggaacgctggctgggccagatgaaggagaagggatttgacctgaaggcgtatcaggagagcgtggtgccgcgtgatgcaggtcttcgtgagaccgcgcctcagccggagcgagatcaccaggctaagccggttcctgccgggcctgagctggcttctctgcagacgtcgtccagggcagaaaagagcgtcgatacacctgctcaacccgcagaacgggagagccagtcccgtcaggctgtaacacagccggctgacacactgcgtcagacggtacagaccggccccgaaaagacgccggcgaccaggagcgttcctgcagcgcagctggacactgaaataccccgcccggaactgactgagtctgtccggctggccatctcgcagctcagcgacagtaaaacgcgcttcacctttggcgagctgatgatgaccaccgctgagctgagtgaacagctgccggagattcaggaaattcgtgtggccatcgatgcggcgctgaaggacggcatgattgtaccgctggacagtgagaaaggggtctttacctcccgtattcacctgcttgatgaactctcgatccaggcgctgagtcaggaacatctcaaatccacaaaagtcgtcagtttcacccgcccggcgcagtacgcgccggcggcgctggaagtggtggagaaagacgccctggttctgatgaatgccccgtcaggcgtggcgggtatccgtgacctgaccgcgcagctggccggtattgccggcgcgaacggtcgtgacgtgcaggtgctggccagctctgccgagcgcgccatttcgctggcgaaatccgacgatttgcgggaacggatcatcagccggcagcatgttctgagcggtgatttccacctgaaaccccagagcacgctgattatcgaaggggcagagcgtctggggttaaaggagacgctggttctgctgggcgaagcgcgcgcgcaggatgcacagctggtctttctcgacagtgccggacgtcaggcgaacggtaacgccatgtccgtgctggagtccgcgggggttgcccgctcccgccgcacggagccggcgcccgggcttgaggccgaagtggtcagtattccgaacaaacgcgaccgttacgaggcgctggccaaccggtttgcagagctgagcggaggaactgaaaacgtcaccgccgttgtggtcggcaggcgtgaacaggcacagctgacgggcctggtacgtgaggcgctgcagaacgcaggacagctggggcgcgacggcgtggagatagaggcccggcagccggtctggctcgacagcaaaacgcgccgcatgcccggttcataccgtcccgggatggtacttgaagatcgcacggacgcaaaagcgcgtaagtcgtatgtgattgaccgggtgcatgaggacacgcgagtcctctcgctcatcgacggggacggcgtgctgacccggatgaaaatcggcgatatcagcgctgactggcgtctcttcagccgcgaaaccctcagtgtggccaccggcgaaaaactgctggccgtggcgggggatcgtgagcacagcctgaaggcaaaagaccgtcttgaggtgaccgggataagtgaaaaggggattgaggtgaaacggggggaagagaccctgacgctgccaaaagaccagccgctctacctgtcgcatgcctacgtgaccgcgccgggcggccgggataacgacaccggtgtggtgctggccgcactgaacagccgcgacatatcgacccagaccatgaattcgctggcacagagtggccaccgggcggaagtgttcacagccgaagtacaggaccgggctgaagcccggctgcagcgcatgaagaccagtgcctctcccgtgcagctggtcagaaacctgagcggtcaccaggacatcagtcaggcggtggattcactgcatgacagcgtccggacggacgccgggctggccgtctggcgtgccatcaatgaccagcgcactgtggtattcagcgaactgaagctggcgacggaagcgcagaaatatcatcccgaccttgaagctatcgggaatgaaattggcgcgatgattaaaaatggcgagctgttgtccgtatccgcagggggagagccggtactggtttcccggtccacctgggagatggagaaagccattctgcgtgtggtggaggaagggaaaggcacacagcagccgttgctggaacaggtaccggaagccgtgctgaacggactcaccgatggccagaaaaaggcgaccaccctggtgctgggaaccacggatcagtttatcgggattcagggctatgccggcgtggggaaaaccacgcagctgaaggcggtgatatctgcactggagaccataccggcggacgttcgtccggtgatgacggggcttgccccgacgcaccaggcggtgaaagagatgagcgacgtcggtgtccgggcgcagaccatcaaatcttttatcgttgaacatgaccaggcgacggccgcaggcggtaagcccgactataaaggacaggtgtttcttatcgatgagtcctcaatggcaggcaaccaggatacggcggcactgttccaggccattgccagcggcggcggtcgcgcggtctcgatgggggatatcgaccagtttgaatcggtcgacgtgggcgcaccgtttaagctgatgcaggagcgcagcccgatggatgtggccatcatgaagcaaatcgtccgccagaaagacctgcagctgcgcggtgccgttcacgacatcattgataaccggatcgatgcggccctgcagcgcattgaaacccagccggctgaccgtgtggcgcgtagcgcttcagcctcgctcccggggagtgccattcaggaaacggagacgcctgttaacgacatcgtggctgactggacggaccggacgccggaggcgcggtcccgtaccctcattatcacccagctgaacgccgaccgtcgtgcggtaaatgccggcattcatgctgtgctggctgcccggggagaactgggggagaaggccattacggtgccggtgctcgataaaatcacccacacccgtcatgagttcaataaaaccgatgcctgggaagccgggatggtggttaaacgcggcgatcgttaccaggacgtgctggccgttgaccgcaacggcagtacggtcacggtacgcgatgaggaggggaagattggactgtattccctgaaggaactcatcaccggcgacgtgcagctgtttcgccgcagcgagagggaagtccgtgccggcgatctgctgaagttcacggcgacagacaaggagcagggacagatggccagccagcgctatacggtcgagtcggtcagcgaaacgggcaatattcgtctgaagggggaaaacggccgcattaccatcaatcctcaggcggtcagggcgcagcagcatattgactacggctgggccggtcaccgggtacggtgctcagggggccagtagcgactatgtcattgcgcnnnnnnnnnnnnnnnnnnnnnnnnnnnnnnnnnnnnnnnnnnnnnnnnnnnnnnnnnnnnnnnnnnnnnnnnnnnnnnnnnnnnnnnnnnnnnnnnnnnnnnnnnnnnnnnnnnnnnnnnnnnnnnnnnnnnnnnnnnnnnnnnnnnnnnnnnnnnnnnnnnnnnnnnnnnnnnnnnnnnnnnnnnnnnnnnnnnnnnnnnnnnnnnnnnnnnnnnnnnnnnnnnnnnnnnnnnnnnnnnnnnnnnnnnnnnnnnnnnnnnnnnnnnnnnnnnnnnnnnnnnnnnnnnnnnnnnnnnnnnnnnnnnnnnnnnnnnnnnnnnnnnnnnnnnnnnnnnnnnnnnnnnnnnnnnnnnnnnnnnnnnnnnnnnnnnnnnnnnnnnnnnnnnnnnnnnnnnnnnnnnnnnnnnnnnnnnnnaagagcacgtccagatttataccgacgggaaggcggactgggttaaggcggtaaaaacgccggagcgggatatcaaaacggcgcacgatgcgctggcgccagaaacgcagcgtaaacaggcgaaagccatctgggcaatgggacagccggtgaataaaacggccatgggccgcgcctgggtgcgccatcagggcatgcaggacgcgtcactgacggcaaaaatcatcccggccacccggcgctttcccgagccggcgctggcgctgccggtgtatgacaacaacggccggagtgcgggcctggctctggtttccctggttgccagcccggaagggcggatgacacagggggagacccggatggtcatgacagaacgtgcccgtggtgcggtactgcagcgaagccagtcaggcaacacgattgtggccagtgacctggcggccgcgcttgatgcagtacgacatcacccgaaggatggtgtggtctggcagaccggcgatgagccaccatcagcacatctgctgaaagtcagcggaggtatcgttacggaggccgcatcagaacacaaactgatccgtgaccaggaggaaaccacacgacagacggaaaaagacatgcttaacaaagccgttaaagcggaaaaagaaaagagtgagactcaggagcgtattgttgtgccggtggaggacgcggtgcgtattacgcccgggatgcttgaggttgacgaccggaatgagccaacgattcctgccggaaaagtgctcattcaggttgccagctcggacagcgttagccacgatgagattggccgtcatatcagggcagaaaaggaaccattggccagcaaagttgcttcggaacgtgcgggagtcagccgcattgtgaatgagctggccaataccgagcgggatattatccggcaacccgaaaatagcgagcgcggccgcatgccggagcgagaagaacagaccctcacccgtaccattcagaaagaacgttaatctcccttttaaccatgagactcagacgatgaaagtacacaaattagctgcattaatagttacaacatacataggctttattgcaacggcacacgcttcggccccgcagctagtcttcagcccggagcaggaggcccgtatcggggaaatcgcagcagactacctggtgtcccacccggagatactggtaacggtcagtcataagctgcaggaacagcaggaggcacgtaagcagaagatgtttgcactcagcgtgatggagaatcaggcgaaccttctgcatgatccggacacaccggtttacggtcctgataatgcaaaggtcgcggtgattgaattctttgattaccagtgcgtgttctgcagccgcttcgcgccggagctggagaaggtcatgaaagcgcagccggacgtccgctacctctttaaggagtggccaatttttggtggtcgctgggaagcctcacttcaggcagcgcagcaggggctgacggtctggcaaaagaaagggccgcaggcctatgtcacctatcacaatgccatctacgccaccggccataatgaaggcaagctgacggcggaggatattcacggggcagcgtcaaaggcggggctgaccactccagctcctggcgaccataccgcgtcccttgagaaaaatagtaacctggcagaggcgctgggactcaccggaacgccggggatcatcgtcatgcccgttagcggagccactcctgacaccatcacggtcttcccggaagccgttaccgctgaaaaactccaggctgcaatccggaaagccaccagggtgaaatgatcctcagtccgaagaacgtctcccgccagagactgtttttcatgttccgcgcgtaaatgccatcttcctgttccgttctcctgcgcttcctcgatcagacctgccggcctgatactgcggcgagcgctgccggttaaacgtcccttcaggacaattagcacgcaaacaatgaacgctaatctggcctgacatctggaaatattgccagcnnnnnnnnnnnnnnnnnnnnnnnnnnnnnnnnnnnnnnnnnnnnnnnnnnnnnnnnnnnnnnnnnnnnnnnnnnnnnnnnnnnnnnnnnnnnnnnnnnnnnnnnnnnnnnnnnnnnnnnnnnnnnnnnnnnnnnnnnnnnnnnnnnnnnnnnnnnnnnnnnnnnnnnnnnnnnnnnnnnnnnnnnnnnnnnnnnnnnnnnnnnnnnnnnnnnnnnnnnnnnnnnnnnnnnnnnnnnnnnnnnnnnnnnnnnnnnnnnnnnnnnnnnnnnnnnnnnnnnnnnnnnnnnnnnnnnnnnnnnnnnnnnnnnnnnnnnnnnnnnnnnnnnnnnnnnnnnnnnnnnnnnnnnnnnnnnnnnnnnnnnnnnnnnnnnnnnnnnnnnnnnnnnnnnnnnnnnnnnnnnnnnnnnnnnnnnnnnnnnnnnnnnnnnnnnnnnnnnnnnnnnnnnnnnnnnnnnnnnnnnnnnnnnnnnnnnnnnnnnnnnnnnnnnnnnnnnnnnnnnnnnnnnnnnnnnnnnnnnnnnnnnnnnnnnnnnnnnnnnnnnnnnnnnnnnnnnnnnnnnnnnnnnnnnnnnnnnnnnnnnnnnnnnnnnnnnnnnnnnnnnnnnnnnnnnnnnnnnnnnnnnnnnnnnnnnnnnnnnnnnnnnnnnnnnnnnnnnnnnnnnnnnnnnnnnnnnnnnnnnnnnnnnnnnnnnnnnnnnnnnnnnnnnnnnnnnnnnnnnnnnnnnnnnnnnnnnnnnnnnnnnnnnnnnnnnnnnnnnnnnnnnnnnnnnnnnnnnnnnnnnnnnnnnnnnnnnnnnnnnnnnnnnnnnnnnnnnnnnnnnnnnnnnnnnnnnnnnnnnnnnnnnnnnnnnnnnnnnnnnnnnnnnnnnnnnnnnnnnnnnnnnnnnnnnnnnnnnnnnnnnnnnnnnnnnnnnnnnnnnnnnnnnnnnnnnnnnnnnnnnnnnnnnnnnnnnnnnnnnnnnnnnnnnnnnnnnnnnnnnnnnnnnnnnnnnnnnnnnnnnnnnnnnnnnnnnnnnnnnnnnnnnnnnnnnnnnnnnnnnnnnnnnnnnnnnnnnnnnnnnnnnnnnnnnnnnnnnnnnnnnnnnnnnnnnnnnnnnnnnnnnnnnnnnnnnnnnnnnnnnnnnnnnnnnnnnnnnnnnnnnnnnnnnnnnnnnnnnnnnnnnnnnnnnnnnnnnnnnnnnnnnnnnnnnnnnnnnnnnnnnnnnnnnnnnnnnnnnnnnnnnnnnnnnnnnnnnnnnnnnnnnnnnnnnnnnnnnnnnnnnnnnnnnnnnnnnnnnnnnnnnnnnnnnnnnnnnnnnnnnnnnnnnnnnnnnnnnnnnnnnnnnnnnnnnnnnnnnnnnnnnnnnnnnnnnnnnnnnnnnnnnnnnnnnnnnnnnnnnnnnnnnnnnnnnnnnnnnnnnnnnnnnnnnnnnnnnnnnnnnnnnnnnnnnnnnnnnnnnnnnnnnnnnnnnnnnnnnnnnnnnnnnnnnnnnnnnnnnnnnnnnnnnnnnnnnnnnnnnnnnnnnnnnnnnnnnnnnnnnnnnnnnnnnnnnnnnnnnnnnnnnnnnnnnnnnnnnnnnnnnnnnnnnnnnnnnnnnnnnnnnnnnnnnnnnnnnnnnnnnnnnnnnnnnnnnnnnnnnnnnnnnnnnnnnnnnnnnnnnnnnnnnnnnnnnnnnnnnnnnnnnnnnnnnnnnnnnnnnnnnnnnnnnnnnnnnnnnnnnnnnnnnnnnnnnnnnnnnnnnnnnnnnnnnnnnnnnnnnnnnnnnnnnnnnnnnnnnnnnnnnnnnnnnnnnnnnnnnnnnnnnnnnnnnnnnnnnnnnnnnnnnnnnnnnnncaagcgatatacgcagcgaattgagcggcataacctgaatctgaggcagcacctggcacggctgggacggaagtcgctgtagctctcaaaatcggtggagctgcatgacaaagtcatcgggcattatctgaacataaaacactatcaataagttggagtcattacccttttttcaacttctgatggatgcgagtgattgaactcatacattaatgttttcccacgaagtcttttttcaggtaagccttcgcacatatcggtaaatagcttgcctgcttttattttttctgtcatcgacatgttcatttttaacattccgtcctgataagttggtcggataaggcgctcgcgccgtatccgacattaatttcttaagcgacttcattcacctggcgacgcagcagggaaagtgggccggggccgctaagcgtgaacacggaaattaaggtgaagcccagcgccaccagacccagcaccaggtaagcgccctggaaaccgatgctttcatacatattgcccgccagaatagacataaaaaccatcgccagttgcttaaagaagcagaaacagaccagataaatcgtcgctgaaaaacgcacttcaaactggctggtaatatatttaaagcagcccaccagcaggaacggtacttcaaacatatgcagcgttttcagaataaccacttccagtgctgaggtagcgaacgatgagccaataatacgtactgacataatagtgccagccagcagcagggcgtttttcccaccgatgcgattaatgatcagtggcgcaaaaaacataatcgaggcgttaagtaattcgcccattgtcgttacgtagccaaatacccgcgtaccctgttcaccggtagcaaagaacgaagtaaagaaattagcaaactgttggtcaaaaacatcgtaggtgcaggaaacgccaataacatacagtgacaaaaaccacagttttggctgtctgaacagttccagcgccagcttaaggctaaatgccgaatggttggcacctaccgcattggcaaccgtggcagaagagggcgcatccgttttggcgaaaaagagtaaaacggcgaggatgagtgcacagccagaacccagccagaaaacaaactgattattgatggtgaacatgatgccgacaatcgaggcacacagcgcccagccaacacagccaaacatccgcgctcgaccaaattcgaaattactgcgacggctgactttctcgataaatgcctctactgctggcgcaccggcgttaaaacaaaagcctagataaataccaccaacaatcgatcctactaaaatgttgtattgtaacagtggcccgaagataaaaataaagaacggcgcaaacatcactaacatgccggtaataatccacagcaggtatttgcgcagcccgagtttgtcagaaagcagaccaaacagcggttggaataatagcgagaacagagaaatagcggcaaaaataatacccgtatcacttttgctgatatggttgatgtcatgtagccaaatcgggaaaaacgggaagtaggctcccatgataaaaaagtaaaagaaaaagaataaaccgaacatccaaaagtttgtgttttttaaatagtacataatggatttccttacgcgaaatacgggcagacatggcctgcccggttattattatttttgacaccagagcaactggtaatggtagctaccggcgctaagctggaattccgccgacactgacgggctccaggagtcgtcgccaccaatccccatatggaaaccgtcgatattcagccatgtgccttcttccgcgtgcagcagatggcgatggctggtttccatcagttgctgttgactgtagcggctgatgttgaactggaagtcgccgcgccactggtgtgggccataattcaattcgcgcgtcccgcagcgcagaccgttttcgctcgggaagacgtacggggtatacatgtctgacaatggcagatcccagcggtcaaaacaggccgcagtaaggcggtcgggatagttttcttgcggccctaatccgagccagtttacccgctctgctacctgcgccagctggcaggtcaggccaatccgcgccggatgtggcgtattgctcgctacttcaacatcaacggtaatcgccatttgaccacttccatcaatccggtaggttttccggctgataaataaggttttcccctgatgctgccacgcgtggaccgtggtaatcaacaccgcgtcggcaagcgtatctgccgtgcactgcaacaacgctgcttcggcctggtaatggcccgccgccttccagcgttcgacccaggcgttagggtcaatgcgggtcgcttcacttacgccaatgtcgttatccagcggtgcgcgggtgaactgatcgcgcagcggcgtcagcagttgttttttatcgccaatccacatctgtgaaagaaagcctgactggcggttaaattgccaacgcttattatccagctcgatgcaaaaatccgtttcgctggtggtcagttgcgggatggcgtggggcgcggaggggagtgtcacgctgaggttttccgccagacgccactgctgccaggcgctgatgtgtccggctgctgaccatgtggtcgcgttcggttgcactacgtgaaccgttagccagagttgtccggcgctcttcggctgcggtagtccaggcagttcaatcaactgtttaccttgtggagcgacatccagaggcacttcaccgcttgccagcggcttgccatccagcgccaccatccagtgcaggagctcgttatcgctatgacggaacaggtattcgctggtcacttcgatggtttgcccggataaactgaactggaaaaactgctgctggtgttttgcttccgtcagcgccggatgcggcgtgcggtcggcaaagaccagaccgttcatgcagaactggcgatcattcggcgtatcgccaaaatcaccgccgtaagccgaccacggattgccattttcatcatatttaatcagcgactgatccacccagtcccagacgaagccgccctgtaaacgggggtactgacgaaacgcctgccagtatttagcgaagccgccaagactgttacccatcgcgtgggcgtattcgcaaaggatcagcgggcgcgtctctccaggcaacgaaagccattttttgatggaccatttcggtacagccgggaagggctggtcttcatccacgcgcgcgtacatcgggcaaataatatcggttgcgaaggtgtcggctccgccgccttcatactgtaccgggcgggaaggatcgacagatttgatccagcgatagagtgcgtcgtgattagcgccgtggcctgattcattccccagcgaccagatgatcacactcgggtgattacgatcgcgctgcaccattcgcgttacgcgttcgctcatcgcgggtagccagcgcggatcatcggtcagacgattcattggcaccatgccgtgggtttcaatgttggcttcatccaccacatacaggccgtagcggtcgcacagcgtgtaccacagcggatggttcggataatgcgaacagcgcacggcgttaaagttgttctgcttcatcagcaggatatcctgcaccatcgtctgctcatccatgacctgaccatgcagaggatgatgctcgtgacggttaacgccgcgaatcagcaacggcttgccgttcagcagcagcagaccattttcaatccgcacctcgcggaaaccgacatcgcaggcttctgcttcaatcagcgtgccgtcggcggtgtgcagttcaaccactgcacgatagagattcgggatttcggcgctccacagtttcgggttttcgacgttcagacgtagggtgacgtgatcggcataaccaccacgctcatcgataatttcaccgccgaaaggcgcggtgccgctggcgacctgcgtttcaccctgccacaaagaaaccgtcacccgcagctcatcgcgcagctcgccgtatatctgaacgtctgcctccagtacagcgcggctgaaatcatcattaaagtgagtggctacatgtaaatcgctgatttgcgtggtcggtttatgcagcaacgagacgtcacggaaaatgccgctcatccgccacatatcctgatcttccagataactgccgtcactccagcgcagcaccatcaccgcgaggcggttttctccggcgtgtaaaaatgcgctcaggtcaaattcagacggcaaacgactgtcctgtccgtaaccgacccagcgcccgttgcaccacaaatgaaacgccgagttaacaccatcaaaaataattcgcgtctggccttcctgtagccagctttcatcaatattaaatgtgagcgagtaacaacccgtcggattctccgtgggaacatacggcggattgaccgcaatgggataggtcacgttggtgtagataggcgcatcgtaaccgtgcatctgccagtttgaggggactatgacagtatcggcgtcaggaagatcgcgctccagccagctttctggtaccgcttctggtgccggaaaccaggcaaagcgccattcannnnnnnnnnnnnnnnnnnnnnnnnnnnnnnnnnnnnnnnnnnnnnnnnnnnnnnnnnnnnnnnnnnnnnnnnnnnnnnnnnnnnnnnnnnnnnnnnnnnnnnnnnnnnnnnnnnnnnnnnnnnnnnnnnnnnnnnnnnnnnnnnnnnnnnnnnnnnnnnnnnnnnnnnnnnnnnnnnnnnnnnnnnnnnnnnnnnnnnnnnnnnnnnnnnnnnnnnnnnnnnnnnnnnnnnnnnnnnnnnnnnnnnnnnnnnnnnnnnnnnnnnnnnnnnnnnnnnnnnnnnnnnnnnnnnnnnnnnnnnnnnnnnnnnnnnnnnnnnnnnnnnnnnnnnnnnnnnnnnnnnnnnnnnnnnnnnnnnnnnnnnnnnnnnnnnnnnnnnnnnnnnnnnnnngagtgtaaagcctggggtgcctaatgagtgagctgactcacattaattgcgttgcgctcactgcccgctttcaagtcgggaaacttgtcgtgccagctgcattaaggaatctgccaacgtgcggggagaggtggtttgcgtattgggcggtagggtggtttttcttttcaccagtgagacgggcaacagctgattgctcttcaccgcctggccctgagagagtttcagcaagcggtccacgctagttttccccagcaggcgaaaatcctgtttgatggtggttaacggcgggatataacacgagctgtcttcggtatcgtcgtatcccactaccgagatatccgcaccaacgcgcagcccggactcggtaatagcgcgcattgcgcccagcgccatctgatcgttggcaaccagcatcgcagtgggaacgatgccctcattcagcatttgcatagtttgttgaaaaccggacatggcactccagtcgccttcccgttccgctatcggatgaatttgattgcgtgtgagatatttatgccagtccgccagacgcagacgcgccgagacagaacttaatggaccggctaacaacgcgatttgctggtgacccaatgcgatcagatgctccacgcccagtcgcgtaccgtcttcatgggaaaaaataatactgttgatgggagtctggtcagagacatcaagaaatagggccggaacattagcgcaggcagcttccacagcaatggcatcctcgtcatccagcggatagttaatgatcagaccactgacgcgttgcgcgagaaggttatgtaccgccgctttacaggcttcgacgctgcttcgttctaccatcgacaccaccacgctggcacccagttgatcggcgcgagatttaatcgccgcgacaatttgcgacggcgcgtgcagggccagactggaggtagcaacgccaatcagcaacgactgtttgcccgccagttgttgtgccacgcggttgggaatgtagttcagctgcgccatcgccgcttccaccttttcccgcgttttcgcagagacgtggctggccttgttcaccacgcgggaaacggtctgataagagacaccggcatactctgcgacatcgtatagcgttactggtttcacatttaccaccctgaattgactctcttcgggtgctatcatgccataccacgaaatgttttgcgccattcggagggggcacgccgaagtgagattcaaaatgccgacgtcagttcacaggtgggtaatgataccaacgtgttgatttcgtattttcactgacaccaggatcatcctgatgttacaaggattgaatgactacagattaaaatagtcatcaacaggttgacagcattacccagcgcccgctttccgcgtatttttcgatttgcactgccgggggcactggcgggtatcgcgttccgcacacttttacatttatttatctggtgactgacctttttaaggagacagaatgaaagccgttggtttctggcaacccggggaaagtacatccgttattgaagatttgtcgcttccccacccatccatgcccaaggggcgtgatcttttgatcagagtcagggcggtcgcggttaacccacgggacctgaaaagccggcgaaacatcagtccctctgcaggcaatccggtagttatgggatacgacgcttccggtgttgttgaagcaaccggaccagatgtgacgctgttcaggccaggtgaccacgttttctatgccggtgtgctcgatcgccagggagccaacgcagagtttcagctggttgacgaacgcattacggggataaagccggcagcactaagttttgaagctgcagcgtcggttcctctgaccggtctgacagcctggtaaatgttatttgatcgtctgcagttgtcagtgaacggagatactgatcagaccctgttgatgcttggcggtgcgggcggagtcccttgtatggctatacagcttgcccgcactctgagtcgggtgaacatcatcgggactgcctcccggcaggagagtgtcagagcggttcgcgggtttggtgcgcattatgtcctggatcattcatgtgcgcttgcgccacaggttgccagccttgctggactccctcccattacccggattttctcaacgtacaccacgccatctgcctgggaaaatatggccgaaattattgccccacaaggccgtatcggactcatcgacgaccctgaaccactggatctgcgtttgatcaaatttaagagcgtttctgttcactgggaggcaatgtttacccgccccatgcatgctactgcggacatgtctaaacagcatgatattcttaacaaactctcatgcatgctggattccggtaagctcaaacctccgttgctggcagagtatggcaggctgaatgctaaagcacttcgccgggctcatgaggacatggaaaataaaaatgtgaacgggaaaattgttttttcagggttctgatgaacaggcctgtcagagtaaaaaaagattcgggttcagcacaatgctgaattctgtctggctatagagtaagaatcgtaccggaattgagcatttaccctcagtacctgcggatgaaaaagcagtctgccctgacatactgaacaatcccttctcataagatgcctctcttttgctgtttaaagagctgagcagtccgggcggagactgacctcgttccgctttccaagcgacccccttgttgaaagtgcgacaaaagagatagggcgaatgactatacttcgctcatagctgcccgtcatgccagctcaaaaaaacaggcttaacgtaggatattttccgttttccaagcggcccccatattgaatggctgacggtactggatttcgatgagataaaaatagaccgtatttttattgccaatattgatgacccggtgaagcgagcgctacttgtttctgtggtgaaagggttacgtggtactggcaaaccactgatgtttgaaggggtggaaacgccaggacagtttgaattcgtccgttctcttggccccggttacctagttcagggctggtataccggaaaacccgaaacaatatctgcgatgaatattcagggttaaaacgatacggggcccggcccgtatcggcaacccgacccgtcagcgtatcgctttctgtctgaagccggttcaggtcggcttctatctgcgcgatgcggcgggagatttattcagaacgactgccgaagttcatccggcgaagcttatccagctgcgcctgcagatggtctatttcgcgctcccggtcggcctgcttttccagcagggcgcggttcagcgcttcctgttcggacaggcgctgtttcagcagaaggatgtcgtcagggggaggtgttgttcataagcccgcattttaccaggcttattcaacgacaaccaggataaagaggcctacaacatggtcagggacgtaagcagtcttttaggctgccgccagtcgatgccttccagaagcattgccagctgcgccggggtcaggaacactttgccatcgcgggcagagggccaggcgaagcggccgcgttccagccgtttggtcagcaggcacagcccgtcgccggtggaccacagcagtttgaccttactgccgctgcggccccggaagatgaagacatggccggacatcgggtcatctttcagcatcgtctgcacctttgcggcgagaccattgaagccgttgcgcatgtcggtgataccggcaaccagccagattttggtgcctgttggcaggtggttatcacttcctttatctgtcctgtgatgatccttatgacttcgccagactacttcaccacacacatgggtctgccagataccggttcgggatggatttccgcttctacgctgaacaccgtctttagaagctctggtttcatcactgcttccggagcaccttgcgccatcacgcgaccgcttgccagtaccaccagatgatcgcaatagcggctggcctgattcagatcgtggagtaccgtcactacggttttcccctgccttttgagttcaaccatcaggcgcatcagttcaacctgatgattgatatcgaggtaggtcgtaggctcatcaagaagaatgagtggggtatcctgtgccagcaccatcgccagaaacgcacgctggcgctggccgccggaaagctgggttaacctgcggtcagccagattgcgcgtccgggtctgactcattgccacgttgacccgctcgttgtcttccgcggagagtcgcccccacaacgacagccacgggctgcggccgtaggaaaccagttcccgtacagtgatcccctcgggggataaatggtgttgcggcagtaaagccaggcggcgagccagctggcgggcggaaaaaccggctatgggtttttcatcaagcaatatctcgccagagtctggtgttaacaggcgagaaaaacagttcaacagcgtcgatttcccgcaaccgttagggccgagcagggccgtgatttttccggcaggcagggcgagagaaagtccatccagcacggtttgtgcgccatagctgacggtcagattttcagtacgtaatctcatttatcgcattctcacaagcagccagacaaaccacggtgcgccgataatggcggtcagcacgcctgccggaagctccagcggcggatgaatgattcgtgccagcagatcggcaatgaccagcaacaacgcgcccgtcagggccgaaacgggcatcagccagcggtgacgcccgccggcgatcctgcgcaccatgtgcggcacgacgagaccaataaaacttatcgggccacagacggccacgccggttgctgtcatcgcgacagccagcatcagcccctggaaccgggtgcgctgaaccgacacgccgagcgtggctgctcgtgcatcgcccagcgccagcaggtcgagatcgcgacaaaagcgcaggctcagcggcaaaaacagaatgagcaacggcacggcaatcttcacaaagtgccagtcgcgcccccataagctacccgtcagccacagcagggcactgtttacatcctgcgggtgcaggagcatcaggtaatccgtcaggctcgcccagcaggcggaaagcgccacgccggtgagcgccagcttcatcggctggtgggtctttgccagcatcttcagcaagatcaaccccgccataccgcccgcaaaggccagcagcggcagcaccatcacggatagtgatggcataagaagcagtgctcccacagaggcaaggctggcggcatggttaatgccgagaatatccggtgatgctagcgggttacgcacaatcccctgtaccagcacgcccgccacggcgagggctgcaccgacaaacagtgccagcagcaagcgcggcagtcggtactccatcaatacataataatgctcgcgtccgtcctgccagtcggtcagcagcgcgcgccacggcacggggatcacccccatatggagtgataacagcgcacagcctgccagggcaagggtgatgaaaatgaccagcgcaattttcatcctcgcctcctcaccagccagacaaagcaaggactgccaatcagcgccagcactgcgcctgcgggcagatcgccggggaaggccagcgcgcgtgcgagtacatctgccatcagcatcagcgtggcccccagcagcatgctcaccggcagtacgttgcgctgatcgaagcctgcccagaagcgcgccagatgtggcaccagcaggccgataaacgccaccggacctgccacactgacgcacgcgccaaccagaagcagcactaacatattgattatcaaacgtagtctcggcaggttcactcccagcgtatgggcggtactgtcgctgacgttgagcaggttcagttgattcgccagcagcaacacgacagggactgcagtgaccaccaccggcaagagctgccagacatcctgccagtgggcgtgggacactccgcctgccagccagtaaaagatgccgtaagcatgatcttcggccagcagtagggtgatgcgggtcagggccatacaaaaggccgacagcgcgatacccgcgaggatcagtttgtttctgtcctgggtatgacgaaacccgcctcctgcggtcatgaccagcagccagctcacgccgcccccgcatgccgcgatgaacgacagggaatagcctgcaaccggcgtcggactcagcgcgctggtaagcgccatagccagcgccgcgccgctgttaatgccgagcagtgaaggagaggccattgggttgtgggtcagggtttgcagcagcgtgcccgcgagcgccaggcttgcgccgatcagaacggcgaccaggcttcgcggcaaacgaaggttttgcaccagcgcttctggtagcgttggcgtgtgtccaggcagcagggcgcggattgcgtctgctccggaaacaggaatggccgagtagcaaaacagactcagccagaaaataataataagtactgcaacgggaagcccccacagcagcaccgggtgttttagcgcggtcatttcacatcggtaagcggctgatggtggaagatttttaccgtgtcagcggcaatacgctctgcggcaaaaataccgcgcatccgcgcccaggcgttactgtcgactgaagcaacctgctgcttctgcgcggcggttaatatctgccagagcggatcttgttgccagcgtttaacaatgctctcttcgcgatagtgggcaaccagcagccaggcaggattgaccgccagcagttgctccaggccgatggacggcatggacgcgcccgccatcgcagcgggaacgttcagccccagagaagccagcacgctgccggtccaggtctcctgggtatgcaggttgaatagctgttcgcgtgatgtgccaaaggccacgcgtgtccctgtgggaagctggctggcccactgcgccatcttctctttatgttgttccagacgcgcctgcatctctcgttttttacctaccacttcgccgatgatagccgctgagtgcaaattttcagcgtaggtttcgttgcgggacttaagcagcagtaccggcgcgatttgctgcaaggcggtgtaaatccccgcatggcgactgctgtcggcaatgatcaggtctggtttcagggcagcaatggcttccaggctcggctgcgcgcgcgttccgacggactgccacggtttcaggtgcgcacgcacttcgggcaggatgcgttttgcatcgttatcgtcggcaataccgatcgggctgacgtccacggcggccagcgcatcggcgaacgagagttccagcaccacaatccgttgtggcgttttatcgagtgtaaacgtgccgtgttcgtcctgaaccgtggcggcaaaggcgtggccgatcaccagcagcaggcctgcaaaaagaaaacggataaatgccaacatagtcacattccagctaaaagcccggcaagccgggcgttaacacatcagaacttcaacgacccctgcatatacagcgtgcgcggctggcctgcgtagatgcctttgttgttgtcgtcataagagcggatgaagtagtcctggtcgaagatgtttttcacaccgaacgccaggttcagatctgccatctgcgggccaaagtcatacgccacgcgtgcgccccagagcatgaagccgggaatgcggccggtactgccgtcggcgctctctttcaccgtattggcgttatccgcaaactggctggactggaaatcgctgttcagattgaacgtccagttgcccggcttgtagtccacgcccagcgtgcctttatgtttcggggagaatggcacctgattgccataggtgtcgcctttctcgcggatttccgctttcacatacgcatagctggcgtagacggaaacgttatcaagcgttggcgttagcgtacccaggtcgtaacgtgcctgcgtttccagcccggtatggcgcgttttgccacgtgcagtgacggtgtcgttggtctggttggagtcgtactgattgttaaagttaattaggaacagccccatttccgccgtcagcgcgccgtcgtcgtagcgggtaccgagttcccaggttcgcgctttttccggttccacattgccgctttgcacagccttgccaatctggctgtactgtacggtgccgaacgagccttcagtgtttgcataaagattccagctatcagtcaggtgatagagcacgttcaacgccggaagcggtgcgttatagctcacctcttcgtgcgtgcctttgatggcgttgttctggtatgactcgatatgttcgaaacgcatacccggcgtgatggtccagttgccgatgtcgattttgtcatccagataccaggcgtgcgcctcggtgccggaacgcgtgtcgcggtcgtaagggcttgagccggacggcaactgcccgctgctggtggcggtgtagtaacgcatttcatgcgttgattcattcacatagcgatagcccacgcccacttcgtgcgcggaagggccgatcataaagctctggctgtagcgtggctcaataccgcgcacccagtagttacgcggcgagagggtgatgcgtttgccttgctccaggtagccgctgcgcagggtttgggtgtagaacccctgaatgttgaatttatgctggctgtccggctggaactggtagcccaggctcgccagcttgcgacggccccagaagcggtcatacgggcgggtggattgccagcgatcggcgtcgtaatccgcgcgggacaggccgccgggcatgtcggcttcaccatcgtaatattgcagcaggctgttgaaggtgtgcacctcattcggcgcatatttgcttttcagcatcaggtcgtcgatgcgggtggcgctgtgctcgcgccagtcactgccgcgcgtgccggagtagagcagcgcggtgccaaaaccgttgtccgctgtgccgcccaccatcaggttgtgcgtctctttcgggttgttttgtgaagaggttgggctgagctgaccttccacccccgcctcgataccaaagtcctgcggaatggcgcgggtaacaaagttcaccacgccgcccacgctctgcggtccgtaacgcaccgcaccaccaccgcgcaccacgtcaatggcatccatgttgccgagcgaaacgggagccagtgaaagctgcggctgaccgtaaggggcaaaggggacggggatgccgtccatcaggacggtcgagcggctggcgaggcgtgggttcaggccccggatgccaaagttcatcgccaggtcgtggctgccggtgccgttgttttccggcgcgctgacgccagggatgcggttaagcacctcacgcatggtggttgcgccggttttggcgaaatcctcacggcggatcacgtcacgcgcgccagcatgttcaaatacgtcgttttcacgcgcatcgcccagccagtcgccgaccacggtcagggcatcttcttttggcgcgggcgcggtctccagcgtccagctgttatttcccagcggttttacctgcagtccgctgccgtccagcagctgttgcaggccgctctcgacgtcgtaatctccgtgcaggccgttgctctgcttgccgcgcgtcaggctggcgtcaaccgagagggtaattccgctgtgtgcggcatactgattgagcgctttgtcgagcgatcccggtgcgatatcaacctgtgcagcaaaagcggaaaacgagagaccggccagcggcagcaggctcaggcgaatggcgttaaccaaaggtgttgttttacgataaacgcgtaacggcgtcataccttctccatcatcatttttgttgtgttcagctatgagtcgaacgagaagggtaaaaaggacaatcgaaatgagaattatttttcttacagcggtgaaatgtttatccagtaccgcgtaatagactgaattttaacgggaagcgtttgagcgataacgttcaggatcgcatcggtatttttcagcgggaacgtcccgctcaggcgcagcccggcaacggcgggatcgcagcgcagcacgccgttgcggtaacggcttagcgtggctatcacctcacccagcggtttatcgctgaagctcaggatgcccttcgtccagcttgtactctcgtcatccagcggtttcactgcgccaaactcagaggcgctgaactgcaggctttcaccagcgttcacgatgcgtttttgcgcgggggcactggcgagaagcacttccacggcgtgctgctgcacgtcaagctgcgtgaaattatcctgctggcggacggtaaattctgtccctaaagcggtgagttggccctgacgggtcaggacgcggaaggggcgttgctgcgcatctttcgcggtagtaatggcgatttcaccgtaccagagccggacggtgcgctgatgcgcatcaaaacgcacatccgccgcgctttgggtattcagcgtgagcagggagccatcttccagttgctgacggctgactgcgcctttggcggtgcggtaatctgcccgcagaccttcgccggtttccgactgccagagttgccagcctccgccagcgccgagcaacnnnnnnnnnnnnnnnnnnnnnnnnnnnnnnnnnnnnnnnnnnnnnnnnnnnnnnnnnnnnnnnnnnnnnnnnnnnnnnnnnnnnnnnnnnnnnnnnnnnnnnnnnnnnnnnnnnnnnnnnnnnnnnnnnnnnnnnnnnnnnnnnnnnnnnnnnnnnnnnnnnnnnnnnnnnnnnnnnnnnnnnnnnnnnnnnnnnnnnnnnnnnnnnnnnnnnnnnnnnnnnnnnnnnnnnnnnnnnnnnnnnnnnnnnnnnnnnnnnnnnnnnnnnnnnnnnnnnnnnnnnnnnnnnnnnnnnnnnnnnnnnnnnnnnnnnnnnnnnnnnnnnnnnnnnnnnnnnnnnnnnnnnnnnnnnnnnnnnnnnnnnnnnnnnnnnnnnnnnnnnnnnnnnnnnnnnnnnnnnnnnnnnnnnnnnnnnnnnnnnnnnnnnnnnnnnnnnnnnnnnnnnnnnnnnnnnnnnnnnnnnnnnnnnnnnnnnnnnnnnnnnnnnnnnnnnnnnnnnnncaggcacaccgccaagctggttgcgcaggttttcaacctgctgccaggcccactggttatcctgatcctgttcataccactgttgccagcgcgcttcctgttgtgggctgacgcgctcgccgcttagcacggcataccagtgggaagctgaacgcagcgcctgacggcgggaatcggttaacgaaggattcataacccatgctccagacgaaacagcaggcagtgctcgacggctttcgccacgtattttttcacggagctgacggaaacaccgagtttgtgcgcaatctcgctgtatgtcaggccatccagttgcgaaagcagaaacgcttcacgtgtttttccgtttagcccgtccagcatgctgtcgacgagttgtagggtctcgagctggctttcgcgttcctcaggtgaaggcgctaccccctccggcataagcgccagcatctccagatacgctttttccagcgcgtttcggcgaaacaggtccaccatcacgcgtttggcgatagcgcacaggaaagagcgaggatcgcggatcgtcgagagcgtttcgctgctcattacccgcaaaaaagtgtcctgggcaatgtcatctgcatcaaaggcagactggagtttgcgcgtcagccaacttttcaaccagccgtgatgggtgtcataaagcgactcgaacgttaaggaagctgtggtagtggcacggtcagacatgcggagtgcatcaaaagttaattatcacgtagccatattaatatgagaatggttatcattacaattggaaataaaattgtttccaataaacatttttaacatgttgtttttctaagtgttataaggtaggtataaaatgggatggatcctctgcttctggcatctgtcggtcagaatgacatcatgatgtggtcaactatgagtgttgcctgaaatgtcgccagcccccggtacagcagaagtatctcgggctttctgcgtttgctcctggtgggtatggcccccgcaagcgggggttattgctaactgtcgtttcaacaaaaagtaacttttttcactttgcccctcagtacaaattaggggcttgccgcggatgtaccatgcctgaatatcttcgagtgatgatttggtgcggctttgttgaataaatcagatttcgggttccacctgactgacctgctgccagagcggggcgtgatgctccggcacggtctgccagccggatgcagccgaacagagacggtgcgatgccatctgctgctcattactgtagatccgcagttcatcatccagcgagatccgtattgataccggctggccacacaggctttccggcacgctgtaacggtttccgccaacctcgatatagccatcccaggagacatgacggatatcgaagtagctggtatcgaagtccgtatccggcaacggctgcagatgctcctgttcctgcgtgaagcgctgttccggtgtctgcctgaactggcgaagttcccgcctgtcggcaacgtcagccatccactgctccagtagctgattaacctgggcgaagctgtcgaaccggcggtaccggacgaagaagttctccttgaggtatttcacaatccgctccaccttacctttggttctggcccttcgtggacggcatgcccgtggcaggaagccatagtgatcggccagcagcaggaacccggagttgaacaccatcttcccgttgttatttttcagcactgcggctttctgattatcgaccagcacggttttcacgctgccgccgaagtagcggaaggcgcggaccagtgactcataggtatgttcagcatcctgctttggtgccgcgaagacatggaagcgacgtgagaaccccagcgtgttaaccgcgaagttaaccctgcatcgttgcccggcaacctcagcctcaacttctccccagtcatgctggagctggtaaccgggctgagtttcgaagcgaaccgttttcttcgatggccgcatcttacgttttggctggatgtagtaacgcaacatggagcgtccgccggtataacccatcgctttgatttccgcgaggatgacctcgccgttccagacattctcagccagacgcatgtcgatatagtccatgaacggcctgagtttggccattttgtggcgtgtttttctggccggaggttccgggtatttcaggtaccgtctgacagtccgctcagagcaaccaacctgagtggcaatatcaacaatatacgcaccctgctggcgcatttgctttatcatgtaaaagtcctcatgagcatggggagtgcggacgaattcctggaccttcaggggttaatttatgcattcatacgaggaccggatccgggccgtcgaactctattaccggtacggaaagaaagcctccgttgtcgtcatggagctgggatatccttccacaaaacagctgggccgttgggttcggatttatgaagagaagggcgatttacccagggaattaaagccaagagaacgctattcacggacacagaaaattgctgctgttgagcattatcttactcacggtggttgcctgtcgtacactcgccgagccatcggctaccccagtaacgaaattctaaagcgctggattgaagagttttacccaaatgcgcgtcccctggtcattcgctcaggcacaaacaaatgcttcagcccggaagagaggtctcaggccgtccgggagctctgtaaccgacgtggaaccgcgcgtaaagttgcacaaagcataggcgtcagcgtcccggtcctgtacaaatggaagaaagaccttatcagtgacgaggcttatcaatccatgcgcaaacgaaaggcagcccctcaagataaaaatcaggatgctttactcggtgaaatccagcgactcaggcagcaggttcatcagctgcagctcgaacgtgacatactgataaaggcgaatgaactgataaaaaaagatctgggcatcagctttctgacactgaaaaacagggagaaaaccctgatagttgatgcccttaagaaaaagtaccccgttgctgagttgctaagcgttctgcaacttgcccgcagctgttatttttaccacaaagccagcaaacgtctgtgcgataagtatgcggaaatacgcgtgatcatggccgatatctttgaggagaattaccgctgttacggctaccggcgccttcacgcgatgcttcgcggtaacaacagggttatttctgaaaaggttgtccgcagactgatggcagaagagcagctcgttgttaagcgcaccaggcgacgacgatacaactcttactgtggcgaaatcggcccggcaccggaaaatttactcgcccgggattttagttcctgcaggccaaatgagaagtggctgaccgatattacggagttccagcttcctgctggaaaagtctatctgtcgccggttatcgactgctttgatggccaggttgtaagctggtcgataggaacacgcccggacgcgactgaatcgccacggataatctagacacttcctnnnnnnnnnnnnnnnnnnnnnnnnnnnnnnnnnnnnnnnnnnnnnnnnnnnnnnnnnnnnnnnnnnnnnnnnnnnnnnnnnnnnnnnnnnnnnnnnnnnnnnnnnnnnnnnnnnnnnnnnnnnnnnnnnnnnnnnnnnnnnnnnnnnnnnnnnnnnnnnnnnnnnnnnnnnnnnnnnnnnnnnnnnnnnnnnnnnnnnnnnnnnnnnnnnnnnnnnnnnnnnnnnnnnnnnnnnnnnnnnnnnnnnnnnnnnnnnnnnnnnnnnnnnnnnnnnnnnnnnnnnnnnnnnnnnnnnnnnnnnnnnnnnnnnnnnnnnnnnnnnnnnnnnnnnnnnnnnnnnnnnnnnnnnnnnnnnnnnnnnnnnnnnnnnnnnnnnnnnnnnnnnnnnnnnnnnnnnnnnnnnnnnnnnnnnnnnnnnnnnnnnnnnnnnnnnnnnnnnnnnnnnnnnnnnnnnnnnnnnnnnnnnnnnnnnnnnnnnnnnnnnnnnnnnnnnnnnnnnnnnnnnnnnnnnnnnnnnnnnnnnnnnnnnnnnnnnnnnnnnnnnnnnnnnnnnnnnnnnnnnnnnnnnnnnnnnnnnnnnnnnnnnnnnnnnnnnnnnnnnnnnnnnnnnnnnnnnnnnnnnnnnnnnnnnnnnnnnnnnnnnnnnnnnnnnnnnnnnnnnnnnnnnnnnnnnnnnnnnnnnnnnnnnnnnnnnnnnnnnnnnnnnnnnnnnnnnnnnnnnnnnnnnnnnnnnnnnnnnnnnnnnnnnnnnnnnnnnnnnnnnnnnnnnnnnnnnnnnnnnnnnnnnnnnnnnnnnnnnnnnnnnnnnnnnnnnnnnnnnnnnnnnnnnnnnnnnnnnnnnnnnnnnnnnnnnnnnnnnnnnnnnnnnnnnnnnnnnnnnnnnnnnnnnnnnnnnnnnnnnnnnnnnnnnnnnnnnnnnnnnnnnnnnnnnnnnnnnnnnnnnnnnnnnnnnnnnnnnnnnnnnnnnnnnnnnnnnnnnnnnnnnnnnnnnnnnnnnnnnnnnnnnnnnnnnnnnnnnnnnnnnnnnnnnnnnnnnnnnnnnnnnnnnnnnnnnnnnnnnnnnnnnnnnnnnnnnnnnnnnnnnnnnnnnnnnnnnnnnnnnnnnnnnnnnnnnnnnnnnnnnnnnnnnnnnnnnnnnnnnnnnnnnnnnnnnnnnnnnnnnnnnnnnnnnnnnnnnnnnnnnnnnnnnnnnnnnnnnnnnnnnnnnnnnnnnnnnnnnnnnnnnnnnnnnnnnnnnnnnnnnnnnnnnnnnnnnnnnnnnnnnnnnnnnnnnnnnnnnnnnnnnnnnnnnnnnnnnnnnnnnnnnnnnnnnnnnnnnnnnnnnnnnnnnnnnnnnnnnnnnnnnnnnnnnnnnnnnnnnnnnnnnnnnnnnnnnnnnnnnnnnnnnnnnnnnnnnnnnnnnnnnnnnnnnnnnnnnnnnnnnnnnnnnnnnnnnnnnnnnnnnnnnnnnnnnnnnnnnnnnnnnnnnnnnnnnnnnnnnnnnnnnnnnnnnnnnnnnnnnnnnnnnnnnnnnnnnnnnnnnnnnnnnnnnnnnnnnnnnnnnnnnnnnnnnnnnnnnnnnnnnnnnnnnnnnnnnnnnnnnnnnnnnnnnnnnnnnnnnnnnnnnnnnnnnnnnnnnnnnnnnnnnnnnnnnnnnnnnnnnnnnnnnnnnnnnnnnnnnnnnnnnnnnnnnnnnnnnnnnnnnnnnnnnnnnnnnnnnnnnnnnnnnnnnnnnnnnnnnnnnnnnnnnnnnnnnnnnnnnnnnnnnnnnnnnnnnnnnnnnnnnnnnnnnnnnnnnnnnnnnnnnnnnnnnnnnnnnnnnnnnnnnnnnnnnnnnnnnnnnnnnnnnnnnnnnnnnnnnnnnnnnnnnnnnnnnnnnnnnnnnnnnnnnnnnnnnnnnnnnnnnnnnnnnnnnnnnnnnnnnnnnnnnnnnnnnnnnnnnnnnnnnnnnnnnnnnnnnnnnnnnnnnnnnnnnnngctggaaactctcgacgtccattagcttaagcatccaggcttcttttgccacgcccttcagtgccgaaagataggtgttgacggtggccgtggcccggccggtgtcgcgcagcagttcggtcacggccatcacgtggtggcgccgcaggctgccccagctgcaggactccagggacgtggcgccgagcatgccggcgacgatgccaaggaacgaggccatggtctgccggctgcggggtgaattgagggacagcaggtaggcccgtgcgggactgaccagggcattaccacctgacagcaccggcaggacatcctcatctggcggaatgaccaccgggggcgggagcagctcgggttcgtcgtcgggcatcaggatcatgtcgggctccgtccgggccggaaagggaccggcgcgctgcgtgaaaaatcggggtaaatgataccgtcagagcgtaccgcagagagtctactttttcaaagatacattttaataagtagaataaatcgtattgtattttttgcacacgtttatactttcatgatatgcatagcaactgactagaaaatcaactgtgttacaaatcgattttgtgagggaacatatatggcacaaaaaaaaattcttacgataggttttgatctggctgacgaaagtgctgaatacagttcttttgataacaacatttctcttttagactgggatgttatactcataagacctgatatatatagttatatcaatagaaaggagtctacattccaaggaaacccatgtttatcagataatgactcctttaaattaaaagcgcagtctgagcactggcgtagagaaattaaaacagccgtagaacatgggaaattagtaatagtatatttatgtgataaaatacctgtttctatagctactggagaaaaacgcacatctggtactggcagaaatcaaaaggtgacaagaatagtaacaagttatgataactatcagtttgttccctgtgaattagcgctaacaagcggcaagggtagggaaatgaaactttcaaataatagttctcagatagtatcatcttattggaaacagttctctgctaaatcaacctatactgttactattgaatctaataatacaacaaaattgatactcactaaaaacggagataaagaagttggttcgttaatacgaagtaataatagcaatggagcgctgctattattgccagacatagatttttatcaggatgatttcataaatgatgaaaatgaatggacaagtaaaggtgagttgtttgctaaagaattgatacgagaagtggtgttaatggcaaaattgatcaactcaagcggggatataactcctccaccaaagtgggttgagtccgaaaaatttttgctaaaacaggaaattactgcatttgagagccttttgaaagttgaagagaaaatacaggccatccagaaagaaaaggagcagatactcagccaaacaaaagatcttgcgcgtcttagaaatcttctgtttgaaaaaggcaagccacttgagcatgctattattgagtcattggtgctaatgggtttcagtgtttcacaatttgataatggcgagtctgatttgatgctgttttcgtttctgaagaaggacgattttatgatttaccgataggttactgcgatgctacatgggataaagaatttctttcaacgctccgatatcttgctgattggaccactggcgcagacccttatatgaacactggggttgttgaaagaattaatgaaccttcaatgataagtcgggaaacgggtatcgaggaaattattcgagaaaaggcaaaggagtatggttattaaatgagtagatacgtcgttgttttaggggatgccactacgcatgatggtaaagttacatcagcctcatccagtttcgatatagccggtaaaaatgccgcacttttgaatgataccgtcagttgcccggaacacggtatgaataaaattattgaatgcgatgtttctgcgtatgaagaaaacgggcatggaattatattgcatggctgcaagacgcagtgtggtgcgagtgtcattgcaagttatgcagctatcagtcagtgataatcttacgctgacagcgggtaaacagctggatgttggtgcgcagaaggactttacgctggcggccggtaaacaactcagcctgtacagccgtgaaggggcaaaactgttcagctcgcaaaacgatattgatattcaggcgcagggcggaaacatcaccacatggtccacacaggatacgcatatttcaagcggcaggaaaatagtcattacagcacaggacgagctgacgctgatatgcggtggcggctacatcaaaatcaaaggcgggaatgttgagattggtggtccgggtaagctgccgattaagaacgcgggtatcaggaaagcggacataggcagtatgcagggggtgatgaagtcgtttgaaccttctacgtttgatgagaaatttgtcatcagaaatgcgctgacaaaagaacctataccaggtaaagcgtacaaaatcaccatgccagatggttctgttgtttccggtattacagatgcttctggagcaacgtcactcaattcttctgatgttatcggcaatatgattatcagcttagtaaaggcgaattaagatgagatggaatcagtcagacaggaaagtccttacaattatagccattattggtgtattcctgtatgccatttataaaggcttacagttcctggcaggagccagtatgggagccagttttggggtgggtctgggaggaatgagcggttctcagaaggtagaagagtcacgaaaagttgaaacagatgctcctgctcaaattatttatcgcatagataaaaatcgatacctgacgctggaaaactacatatcctgtgataggggtggacaagtatattacaatgactctcagaggggaataaaaacacacctgggatgggataacgatttttatgatttctcatatcgccggggaaataatattgcggcttatcaaggctctattattaatggggcggataatggttatctggcattccctggcgcatctaccagacaatattgtggtagtggaaggtcagaaacaggttgccctgtgtttttcttcttttcagcagatcatgggaacacatttatatataaaattgtagctatggaatacagcaccccagaacgttttagtcagcttaaagtagtagtggctaatgatggtgtttatctaagggatgagtctaaaacggaggatagctattctcgccctacaggtctcaatgaccttagctcagtgaataaattaaggttttctgacggcaatttaatcagtgtttatgatgactggcagaaaaaaattgatgagttagtgaaagaagaactgataagaaaaaaaatgccctatgcaaacgagtatggacctagatttcatatattcgactatctcagaacattaacgccaccgaaaacacatgaggaaaggaatttaatggcaaacgaattgtctgaaatccagattaggattgaagatgaagtttataaagatggaattaaatttccgaagccttcaacgtcaagtattgatgttaaatatcaatgtaataaaaatattaaagctaaagccatcacatatactaatgagtcaaatgggaaaaaggaggtggtgaaaaatgaacaataattaggaaaacatgccggatggtggcttccccttatccggcctacaattgttaaaacaattttaacaatggtgccgctttgactcgtccctttgattatcaacaagattttgccaatattaattttcgcgaacatcccgaacggtatcaggttggccggggtgagcagggcgtattgatggtcgagccttataaaagcgaaatcctgccgcactggcgttataaaaatgctgaagtcgcagcgcgttcggcagaagagatctacgccctctttgaagagtaccgcaggaataacgattttgtaggtatggatatggcgcgtaaattcattcagatgggatacacccgtgcccgacgatacgccaatcataaaggcggaaaaaagtatgatgagaatcgccaggtcaaacccctcgatcacgatccagtaaaagcagaagccgctgcggtgttcaaaacgtggtgggataaaattcgtgctgatgaagattatttgcagcgaaaaaaggctcaccagcaagcgtggggataattactacgtccgctaataattcgatacctgatcgagttcacaaaatccaatgaaacatattggaaacattttatttacctaacgattcgttttaaatccggttttactgtttgtgggcaatggcccgcaatgtgagacaggggattttaaaatgacagaaaccgtagccagtgcagatacggataacacaagtttagcaggcaaggatactcgccgtcgggtttgggcaatcgttggagcttcatcggggaaccttgtagagtggtttgatttttacgtctattcattttgttcactctactttgcacatatcttcttcccgtcagggaacaccacaacgcagcttctgcaaaccgcaggcgtttttgccgccgggttcctgatgcgtcccattggcggatggctgttcggcaggatcgcggacaggaaagggcgcaagacatccatgctcatctccgtgtgcatgatgtgcgtcggctcgctggtgattgcctgccttcccggatatgacactatcggaacatgggcaccggcgttgttgctgctggcacgcctgttccaggggctgtcagtgggtggcgaatatggcaccagcgcgacatacatgagcgaagtagctgttgaagggcgcaaaggtttctatgcatcattccagtatgtaaccctcattggcggtcagctgctggcgttactggttgtggtgatccttcaacaaatccttagcgatgaagatttacgcgcctggggctggcgcatcccgtttgccctgggggctgccctggcggttgtggcgctgtggttacgccgtcagcttgatgaaacctcccagcaggaggtcagggcgctgaaagaagccggttcgatgaaagggctgtggcgaaaccgcaaagcgtttttgatggtattaggctttaccgccgcaggctcgctaagcttctataccttcaccacctatatgcaaaaatatctggtcaacaccacgggcatgcatgctaacgttgcgagtgtcgtcatgacggtggcgttactggtctttatgctcatccagccgattgttggcgcgctgtcggacaaaataggtcgccgcacctccatgctgatctttggtggcatgctcaccctggggactgttccgcttttgacggcgctacagcatacaacctctccgtatgccgctttcgctttgattatggtggcacttattattattagtttttacacggcaatcagtggcattttgaaagcagaaatgtttcccgcacaggtgagggcgctgggcgtaggcctctcttatgcggtcgctaacgccctgttcggcggttcggcagagtatgtcgcgctatcccttaagtcatggggcagtgaatcgacctttttctggtatgtcaccatcatgggggcgctggcgtttattgtctccctgatgctgcatcgtaaaggaaaagggatccgcctttaataatgcgccatctgccagacggcgtagccggttgttgccccggctacgtcccaggcaaaatctttccagctccagccgcttcccgaggggcggctatcccaaagttcttttgatgcccccaggctgatggagaacatcagccccattgtggcacttcgatcccggctataaccctggtgcagcgcatattcattacccgcagcggacaacattgcagacgccagaaagtgttgagctttatcctgacccgaccagttatcattagccatatggctgcaaccggtcaggaaaagagggattatcaggaaaagcgtacgcattaacagactccataaaaaagccccgtcgatgacagggctcgtgtattacagaatgcggctgatgaggcggtcgatacggatccgacgtagacggcgaatcagcttgcgaactttcaccggataatcagcgatgctttgcagatcgcgataatgacgaaccactgtagtatgcgtgcgtataagctccagctcacgatcgcgtttcgcggctaacgcatgctgaggatcgtgaataaggatggcgttttccagatccagacgccaggcgcgtgggttgagattattaccggtcagcagcatccactcatcatccacccacattcctttgaggtgatagctgttgtcttcatctttccagagacgcacaaccagctggtccgtgttcacatagtactgtaaacggctcaggaagcggcgcaggttaatctcatagagataaggcagtgcgccgatgatcttgaaaggctgatcttccggaatgaaaaagtcatttgccgttttatccccgacaataatttccacctttttaccatcacgcagcagctgaatgatattacgcaccagaacggcgggaaggttgaagtacggggtacagatggtgagcttatgctccgcgcacggcatcaaatggaagatggtcttgttcagcaggctggattttcccaggcctaccagaggcgtaacggacagttcttcattactggcatccccctgaaaacgataaaccgcatcgcgcagttcctggcggaaggagcgaacgtcgtttttgatttccgggcttttcggacgatgaggatcgtcaagacggtgcacaccccggccatgaaccaggtttttatcaacccagttgaacatgatgtcggccatctgcggattgcggatcagatggtagcgatcgtaacggtatttatcgagctgatggagatacacatcattcaggctggcaccgctataaaggacgctgtcatcaatgataaatcctttaaaatgaagaacgccaagcgcttcacgggtattcaccggtacgccatacaccgggatatcaatacccggattttcctgggccgtgcggcaataccagtcagcattggtattcgaggcagccgcaccaatacggccgcgctgagcacggtgccagtcaaccagcacgcgaacatccagttccggacgctgacgtttcgcttcatagagcgcgttcaggatcgcacgcccaccttcatcttgttcaagatagagcgccacaatgcaaatacgtcgcgtagcgctggcaatcttttcaagaagcgtctcccggaaatgagcgggagcataaaagaactctacatcatcaactgactgagaaatcttcggtagttgagcaaggtgttgttgatgtttattacgcttaaattttgacaacatcacagtgcgtttcttctctgttcattgaagggttgtctgtaccaggcaaacaacataagcggacaatgataccccagtgccgcgaaaagtgggtaacatttccagcagcttactcttgtttatccgtcgaaatcaggctgagggacagagagacaatgccttcatccagctggatatcaacgtcaaaaccgagcttccgcgccagggtcaccataccccgattgtttggcatagtaatgccattcaggcgtgacaatccgtgatcgcgcgtataaccaatgagtttttcgagcagccgtctgcccaaccccaaacccttaagatcggaacgcaccagtacggcaaactccgcatccacgttatccgggtcggaaatggcacgcgtcacgccgaggatctcctctcccgctccggaacggcggaccgccacaatcgccatttctcgatcgtagtcgatctgggtcatattggctaaatcatcgtgggtaaattcattgatttcgctgaaatagcgatagtacaaatcttccttcgtcacctgcgagatgaacgcccgcagcagcggctcgtcttccggcaggatagggcgaaacagcgcccgttccccatttttcatctccacccactcttccagatgaagaggataaggacgaatggcgagacggctttcccgatcaccgataaagggcgcaatatccagcgtcacgtccagcgcggtaaattcatttccggaggcaagaagggggtggatatccaggcgctggatctccgcacagtcaacaatgaggttggagaccttcaccagaaactggcttaacccagcgatatcaagcggccgcagagcgcttctcccgcggatttttttgcttttgatggcctgaataatcaaataacgcgccaggttcatgtttagaggaggaagcgcgacaaccgcctgttcttctggccgccactcaacgccgccttcacccagcataatgagcggaccaaaaaccggatcgtgttcgacaaccacgcgtagctcctgcgcacctgcacggttggccatgctctgcaccagcaggccgtggatccgggcctgtggccacgtcatttttacgcgatcgataatggcatccgcggcctgttgtacttctgtcgcggtgcgcagatacagcatgacgccctgcacatccgatttgtgcggaatatcgggagagcgcagcttcagcgcgaccggataaccaatctgctcagcgatatgtaccgcctcagcgctgtcgccggcaatccaggtgggcagggtttgcatcccatagctgccaagaatgggttgcacctcatgtgtgtcaagagaagcggcgccctcttcgatggcctgctgcaaaagcctgtgcacatccaccgaatttgcggtgagattgcccggcagggcaggcgtttcacgcagctgcttctggttgcggcggtattcaaccatatgcataaacgcggtaatggtgccctccggggtacggtaggttggcaacccggcttcactaaacagacgccgtgcctcctgggaggagaactcgccgcaccagttggtcagcagggtaacgtatttgccgcggggatgttttcggactgcctcaatcagcgcacgcgcactttcgctgcctggcgcaaccgcgctgggcgaatggataatcatcagcgcatcaaagtcctggctatcgagcaaaatcgtgatcgccttaatgtaacgatcgctgctggcatcatcgcgcaaatcgaggggattatcgggaacaacgcttcccggtaacgcgtcccgcaggcgctgtagcgtctcttcacccagcgtggccagcttgccgttgcgtagccagagctcgtccagcgccagggcggcgggagcggcaccgttgctgacaatcatcagcttttcaccgcgcagggggcgcatgtggcttaacgtttcgacggcggaaaaaagctcgtgcgtatcctgtacccgcagtaaaccggcgcgctggatcgctgcatcccatgcgggatccatccctgaacgggaatgtagcaggcgctgagccgcagggctgcgcccgcttttgatgaccagtatcggtttatttcgcgatgcgctacgtgacgccgacacaaaacgacgggcgtcgctcaggtgttcaaggtagagcaggatagcgctggttttgctgtcacgcgccaggaaatccagcagctcatcgacgtcaatgtccaggctgtcgcccaaagcgatgaagtaggaaaaacccatctcacgctgctgcgcccagtcgaggatggtattggataccgcagccgactgcgaaataaaggccagtttgcctttgcggatcggaaccggggaaaaactggcattcagcccctgccagggcgcaagcagaccgaggctgtttggaccaagaatgcgcatctggtagcggctggcgcaggccagcagttcgggctgctgttcaggaggcgaggaaagaataatgcaggttttacagcctttctgaccgagcgactcaagcagttcgaggtttcgtttcgcatgcgtacagagcacggcgaggtcgggaacgaaaggcaggctctgcacatccggccacgccagtaccccctgtaccgccttataagcgggcgtaacgggcatgaccgggccgttaaacccgccagccagcaggttacgcatcatcagataccctgcgcggtccggtttcatcgaggcgccaataacggcaatggatttcggacggagtagcgcttctaaccctctctggctcatgcaggcctcccgtgaatgcaagcgacctgatgattttaaacgctttctgtctctgttgctgtgacgctacccttatgaacggtttttcccgcaagataacgttcacggaagcaggagaagtgggagcccagcgcgccggccgcctgggtatcgcccgccaggtccagtagcgcaatagcgacttcagcggtgcaatattgaccgtcggcatgcgcttcacgcaagcgataggccgaaacgcgcgacagatcgacggaaatcaccggcagcgcatcaaggtaagggcttttgcgaaacatctttctcgcttcggtccaggtgccgtcgagcataataaacagcggcggcttaccggatggtggcgccgtaagcacctgacgttgttcgcctgcatatgatgccgggaaaacgaccatgggctgatagtccgggcttgccaccaggtcgagcagagcctgaggtggctcagtgcgcgaccactgaaacgctgcggtgttgggcagaatatcggcgatcaaacgccccgtgttgctgggcttcatcggttcggtatcgaacatgaccagacaaaagcggcttttcgcctcgctcggtgcaagcgtttcgcacagacacactttcagcggtaaaaggcagcgctggcagcggcgaatacgattgcctcgggccagaaaagggcgggtggcgcgcgcaaggcgctcggcgcgtaattgaagtacagcgttatcagtcatgggcgaaaaggcaggaaaaacctcattttcgcagaggagcgaacggggcacaagctatgccccgcgaatgttacagggattcgtttaaccagctgtcgaaaggcgctttcggtactgcaccattgagcatatcgatcacttcaccatttttgaaaatcataatggttggaatgctgcgaatgcgaaaacgggcgctgagttcacgttccgcttcggtattcactttgacaaaacgcattttcccgctgcgctcttcagccacgtcttcgaagatgggcgcaaagttacggcaggggccgcaccacggtgcccagaaatcgaccacaacaggcagatcgtccttgaggagtttgtccagcgtagcacccgtcgcgttaatgacatcgccatcaaataattcgtggccacaacgcccgcatttcgcaccgtcatccacccggtcgtccggaatgcggtttacagcctgacagttggcacatacggtattcataactaacctctgatagagccgtggaacaacggcagaacgccgataatgtttctgatatgttacatattatcagtgagcctgtatgaaacgacaatgcgttttattcaatgggaacaatagtcacaggcttttgtacgaaattatggctatgagcttgcacatcgggtaatctgcgcgcttcgcgcagcgctggtggagaaaagcatgaacgacgaaatgaaaaacaaaagcggcaaggtcaaagtgatgtatgtccgcagtgatgatgactctgataaacgcacccaaaatccgcgtaccggaaaaggtggcgggcgtccggcgtcttctcgtgcagacggtggccgtcgccccgcccgcgatgacagaaataaccgcggcgatgaccgcaaacgtgatgaccgtaagcgtgacgatcgcaaacgcgatgatgttgtccgtgacggtggatcgccatggcgtaccgtttctcgcgcgcccggtgaagaggcgaccgaaaaagccgatcacggcggtatcagcggaaaaagctttatcgatccggaagtgctgcgtcgtcagcgtgcggaagagacccgtgtctacggtgagaacgcctgtcaggccctgttccagagccgcccggagtgtatcgttcgtgcatggtttattcagagcgtgaccccgcgtttcaaagaagcgctgcgctggatggcggcgaaccgcaaagcctatcacgtggttgacgatgccgagctgacaaaagcgtccgggactgaacaccacggcggcnnnnnnnnnnnnnnnnnnnnnnnnnnnnnnnnnnnnnnnnnnnnnnnnnnnnnnnnnnnnnnnnnnnnnnnnnnnnnnnnnnnnnnnnnnnnnnnnnnnnnnnnnnnnnnnnnnnnnnnnnnnnnnnnnnnnnnnnnnnnnnnnnnnnnnnnnnnnnnnnnnnnnnnnnnnnnnnnnnnnnnnnnnnnnnnnnnnnnnnnnnnnnnnnnnnnnnnnnnnnnnnnnnnnnnnnnnnnnnnnnnnnnnnnnnnnnnnnnnnnnnnnnnnnnnnnnnnnnnnnnnnnnnnnnnnnnnnnnnnnnnnnnnnnnnnnnnnnnaacggcactaccgtgcagcagtgggtcagccaggcggatgccgatgactgcgtgctggcgctggaagatgtgggtaacccgcataacctgggcgctatgatgcgtagctgcgcgcactttggcgtgaaaggcgttctgttgcaggatgccgcgctgctggaatccggtgcggcgattcgtactgcggaaggcggtgctgagcatgttcagccgatcaccggcgacagcgtgctggaagccctggagcagttccgtaaagcgggctacaccattgtcaccacctcaagccgtgccgctacgccgctgtttaaagcgacgttgccgcgcaaaatggtgctggtgttaggtcaggagcgtgatggtctgtctgatgcggcactctccagcgctgacctgagcgtctctatcgacggcactggcaacgttgaaagcctgaacgtatccgttgcgaccggcgtgctgctggcggaatggtggcgtcagaacaaggcataagccttttatgtgccgggcctgatccggcacattcaaaccctactcgctctctgccggtaacacaggcatccagtcaatcggcttttcgccacgcttttccagccactcattcgtcagaacaaaatgattactgccaaagaaaccgcgatgcgcagacagcggcgacgggtgcggtgccttcagcacgtgatgacgctgacgatcgataatcgcccctttcttttgggcatgcgaaccccagagtaaaaacacgacgccttcacgatgctcattgatcaggctgataaccttatcggtaaaggtttcccatcccagactggcgtgggagtgtgcctgacccgcccggacagttaatacggtattcagcaacagcacgccctggcgcgcccagctttccagataaccgtgattagggcgggtgaaaccaggaatcgttccttccagctctttatacatattcagcagagaagggggatggccacgcccggacgcacggaaaatgccagtccgtgagcctgcccggggccgtggtacggatcctgccccaggataaccacctttacatcactcagttcggtgtagcggaaggcgttaaacacatctttctgcggcggataaattgtctggccggcctgccgttcagccgcaacggtactgagggtgttaataaaatagggctgctgcttctcttctgccagcacgtcatgccaggttaaaggtgttgtcatctcgctctcctgcgaatctcattctgtgtctagcttacctgctaaaccccaatgagcaaaattacccgcggaaaagcaggctaagtgtctcaatttatgttgaaaaccaggcaggataagttgaattggtaaacctttaaaattgatctaaaacaaaaaatacagaccacactctttgtgtggttggtggttttgttgatttaaatcaataaatcacccgggtctgaatgttatatatacacacaacaaacaatggttttaccaattggccgcaaaaggccagcatcagttaatgtagcctaagggaggcaacacatgattacaggtatccagattactaaagctgcaaatgacgatctgctgaactctttctggctgctggacagcgagaaaaacgaagcgcgctgtgtagtagcgaaagcaggttttgcggaagacgaaatcgttccggtgagcaaactgggcgaaattgaataccgtgaaattccaatgcaagtgcaaccagaagtacgcgtggaaggcggtcagcacctgaacgttaacgtcctgcgtcgcgaaacgctgatggatgccgttgagcacccggaaaaatacccgcagctgaccatccgtgtgtctggctatgcggtgcgtttcaactctctgaccccggaacagcagcgcgacgttatcgcgcgtacctttactgaaagcctgtaaggtttcagcttcgggggtggaataaaaaagccgggaatatcccggctttttttactcttccgtttttgtctctggcgcagcagaacttggcttacggcgcttaccaatatttttggtatcgcggtggcgctgtttaacgcgcggcttctctttttctttctcttttctctcagcacgtttcgcgagcgctttcttggacggtttacccgtcattttttcactcggcgcacgtgtggtcggacgaagcccgtcaatcacgcgagctttcagcggctcctcaacgtagcggccaattttctgtagcagcaaatggtcgtgcgcttctaccagagagatagcaatacctttgcggcccgcacggccggtacgaccaatacggtgcaggtaagtatcaccgctgcgcggcatatcaaagttgattacgtggctcacgtccgggatgtcgatcccacgcgcggcaacatcggtggcaaccagcacattcacgcggccatcggtcaggcgcttaatcccttcggttcgcttaacctgcgccatttcaccttcgagatagcagttgttaatgccggcgttgcgcagcatttctgccagctcatgcacgcgctcacgtttgcgtacgaagacgatggtacgggttgcctcttcctgcttcagcaggtgtttcaacaactcaaccttatgctcaaggttatctgcgcggtagtaccactggtggatcttcttacgctcacgggtcgatggcgtagcggacacttccaccggatcttccagcagacgttcggcgaaatctttaatggcatccccttcaagggttgccgagaacagcattgtctgattacgccagcgcgtttcacccgcgatgagttcgatatcctgggcaaagcccatgtccagcatgcggtcagcttcatcgagaatcagcgtttccaccgcgcggcagtcgaagttctcttcttttatgtattgcagcagacggcccgtcgtcgcgacaacgatatcctggttttcgctgaacacttcggcgtggttcatatacgctacgccgccggtgatggtcgcgatatccagatgggtgttcgccgccagctcacgcgcgtgttcggcaacctgcatcgccagttcacgggtcggggtcaggatcaaaatgcgcggcgggcctgattttttacgcggaaagtcgagcaaatgctgcaacacaggcagcaagtaggctgctgtcttccccgtgccggttggcgcagaaccgagcacatcgcggccctcaagcgcaggcggaatggccgcggcctgaatggcggtcgggcgtgtaaagcctttgctctcaagggcattgagcaggctttcatcgagttcaagttcggaaaaagtcgttacagtcatgttctacctctgtgtggggcgctgattatagacgttacggctgtaatcttcatctgtttgtatggatatcgcttttcgaccacttcgctttcccctatgctactccagtttcactcagaaggttgccctgacatgtctcaactcaaagcgcagttgcgccgcgatggttttacgtttaaacagttttttgtggcgcacgatcgttgtgcgatgaaagtcggcacagacggtattttactgggtgcatgggcgcctgtcgcaggtgtaaaacgcattctggatattggtacgggcagcggacttcaggcgctgatgctcgcgcagcgaacggaagaacacgtcacgatcgacgccgttgagcttgatcctcaggcggctcggcaggcaagtgaaaacgctgccgactctccgtgggcagatcgcatcagggtagaatgcgccgatgtcctgacctgggcgtcggagcaaaccgcgcgttacgatttgattgtcagcaatccgccgtatttcacgccaggcgtggaatgtggaacgccagaacgcgagcaggcacgttacaccggctcgctcgatcacaaggcgctactgaccagtgcggcggagctcatctcggaagagggatttttctgcgtggtcttgcctgaaagcacgggtaataccttcattgagatcgcacgggggatcggctggaatctgcgtcttcgtaccgatatttcggatacggaaggacgcttaccgcaccgcgtgttgctggcgctctcgccgaaagagggggaatgctttatcgacaggatggtcattcgtgggccagaccagcgttattccgaagattacactgcactgacccaggccttttatctgtttatgtgaacctgcggcgtcaacaccgacgggccggacatttcaagcggttcgggatagtccagcgtataatgcaggccacggctctctttgcgcatcatcgcacagcgcacaatcagctcggcaacctgcacaaggttgcgcagctccagcagattattagaaacgcggaagttggcgtaatattcatcaatttcctgctgcaacatcatgatgcggcgtaacgcgcgttccagacgtttcgttgtgcgtacaatcccgacataatcccacatgaaaagccgcagctcgtgccagttatgctggataaccaccagttcgtccgggttttctacccgactttcatcccatgccggcaagtgtgttgtcggacgtgcatagggcatgcgtttggtaatatcttccgcagccgaccacccatacaccagacactccagcagcgagtttgaggccatgcgattcgcaccatgcaggccggtgtagctgacctcgccgatcgcatacaaaccatccacgtcggtacgaccatgatcgtcaaccatcaccccgccacaggtatagtgtgcggcaggtacaatcggcaccggatcgcgggttaaatcaatacccagactcagcagcttttcataaatcatcgggaagtgctggcgaataaagtcttccggtttatggctaatgtccagatacatacagtcgacgccaagccgcttcatctcgtggtcaatggcgcgggccacgatatcccgcggggcaagttcacctcgggggtcgaagtccggcataaaccgggaaccgtccggacgcttcagatacgcgccttcgccgcgcaacgcttcagttaacaggaagttacgtgcctgcgggtggaaaagggcggtaggatggaactgattaaactccatattcgccacgcggcagcctgcgcgccaggccatggcgataccgtctccggaggcgatatccgggttagtcgtgtactggtaaaccttggaggcgccgccggtggccagcacaacggcttttgcctggcaggtttcgaccttctctttattccgattccacacccatgcgccgacaacacggcgcgtgccgggcaggccaatcttatcggaaataatcaggtcgacggcgttgctgcgctccagcacccgaatattgggatggctgagggctttgctgaccagcgtggtttcaaccgcttttccggttgcatcagcagcgtgcagaatacggcggtggctgtgcccgccttcacgggtcaggtgatagctctcttcaccattaggctgaacctgcgtatcaaacagcacgccctgatcgataagccattgcacgcagtggcgggcattgctggcgacaaactctgcggcatgctcatccacgatcccggcgccggcaatcagggtgtcttctacgtgcgaggctatactatccgtttcatcaaacaccgcggcaataccgccttgtgcatagaaggtggaaccttcgcttatcggccctttactcagcacgattacgttctgatgttccgccaggcgcagtgcgagggataggccggcagcaccgctgccgatgatcagtacatcacnnnnnnnnnnnnnnnnnnnnnnnnnnnnnnnnnnnnnnnnnnnnnnnnnnnnnnnnnnnnnnnnnnnnnnnnnnnnnnnnnnnnnnnnnnnnnnnnnnnnnnnnnnnnnnnnnnnnnnnnnnnnnnnnnnnnnnnnnnnnnnnnnnnnnnnnnnnnnnnnnnnnnnnnnnnnnnnnnnnnnnnnnnnnnnnnnnnnnnnnnnnnnnnnnnnnnnnnnnnnnnnnnnnnnnnnnnnnnnnnnnnnnnnnnnnnnnnnnnnnnnnnnnnnnnnnnnnnnnnnnnnnnnnnnnnnnnnnnnnnnnnnnnnnnnnnnnnnnnnnnnnnnnnnnnnnnnnnnnnnnnnnnnnnnnnnnnnnnnnnnnnnnnnnnnnnnnnnnnnnnnnnnnnnnnnnnnnnnnnnnnnnnnnnnnnnnnnnnnnnnnnnnnnnnnnnnnnnnnnnnnngtacatcacaatgaagttcaggcgtcgtgttcatgatgtttgtttaatttactaaacatggtgtggggagaatagcattgtgatgcgagatatcgcacgttttttttgttgtgtgttgcaatgactaaacggaaggccagaagttaaatctgcgctaaatggccggaaatattttgcgaagcagatcgttagcttcagattttgtggtgaaataaagcctgtgttgcgttactcttctgacgataaagttgatgattcttgtcagaaagcgggtgcgtatcgtgaacagacttataatgagagaaaatgaacggtctgcggcgcgatgaacaaaaacaaaggcgttacggaacttattgaagaacagacactctaattcggtgcttgctcaaagtgcaatgttgttagagtggcgtttcgataacgcgtggaatttggtttggggagacattacctcggatgagcgagcagttaacggaccaggtcctggttgaacgggtccagaagggagatcagaaagcttttaacctactggtggtgcgctaccagcataaggtagcgagtctggtttcccgctatgtaccgtcaggcgatgttcctgatgtggtgcaagagtcttttattaaggcctatcgcgcgctggattcattccggggggatagtgctttttatacctggctgtatcgtattgcagtcaatacggctaagaattatttggttgctcagggccgtcgtccgccttcaagtgacgttgacgctatcgacgcagaaaacttcgaaagtggcggcgcgctgaaagaaatttcgaaccctgagaacttaatgttgtcagaagaactgagacaaatcgtttttcgcacgatcgagtcgctcccggaagatttacgcatggcaattacgttacgggagctggatggcctaagctatgaagagatagccgccatcatggattgtccggtcggcacggttcgttcacgaattttccgtgcgcgagaagccattgataataaagttcaaccgcttatcaggcgttgacgatagcgggatactggaaaaggtattaggcatgcagaaagaaaaactttccgctttaatggatggtgaaacgctggataatgagctgctcgatgagttgtctcattctcccgaaatgcaacagacctgggagagctatcatcttatccgcgactcactgcgcggtgataccagcgaggttctccatttcgatatctcagcacgcgttatggcggccattgagaacgaacctgttcatcagaccacgccgctgattcctgaagcgcagcctgcacctcaccaatggcagaaaatgccgttctggcacaaggtgcgtccatgggccagccagctcacccaaatgggggtcgctgcgtgcgtatcgcttgcagttatcgttggggtccagcactataatactcagtctgaagccaatcagcagcctgaagcgccagtgttcaatacgctgccgatgatgggtaaagccagcccggttagcctgggcgtaccggcagatgcttccgcaagcggcggacagcaacagcaggtacaggagcagcgccgtcgcattaatgcgatgttgcaggattacgagttgcagcgtcgtctgcactccgagcagcttcagtttgagcaggcccaaacccagcaggctgctgtgcaggtgccaggaaaccaaactttaggaacgcaatcgcagtaatgaagcaactttggttcgccatgtctttgatggcgggtagcctgttcttctctgctaacgcctcggctgatgtttcatccggggcgttgttgcagcaaatgaatctggccagccagtcactcaattacgagttggcatttatcagcatcaataagcagggtgtcgaatcgttacgctatcgccacgcccgccttgataaccagccgctcgcccagcttttacagatggatggcccgcgtcgggaagtggtccagcgtgggaatgaaatcagctatttcgagcctggccttgagccgtttacgctcaatggtgactacatcgttgactccctgccgtcgctcatttacaccgattttaaacgtctcgccccctactatgattttatctcggtggggcgaacgcgtattgccgacaggctgtgcgaagtgatccgcgttgtcgcgcgggatgggacacgttacagctatatcgtctggattgacgcagagacgaagctgccgatgcgcgttgatctgctcgatcgcgacggtgagacgctggagcagttccgcgtgatctccttcgatgtgaacagtcaggttggcaacagcatgcagaatctggccaaagccagcctgccgcctttgctttccgtgcctgccggcgattctgtcaattttaactgggtaccatcctggatcccgcaagggttcagcgaagtttccagcagccgtcgccagctcccaaccatcgaaacaccggttgagtcgcgactctattccgatgggctgtttagcttctcggtgaatatcaatcgcgctacggcgaacagttccgaacagatgctccgtaccggtcgccggacggtcagcacgacggtgcgcgataatgcggaaattaccattgtcggtgaattaccgccgccaacggcaaaacgtatttcagacagcattaaattcagggctgcgcaatgattaaagagtgggccacggtcgtatcctggcaggatggcgtagcgcttgtcagctgtgacgttaaagcatcatgcagcagctgcgcttcgcgagccggttgcggcagccgcgtgttgaataagctggggccgcaaacgtcgcacactattgctgtgccgagcgatcagccgctggtggcagggcaaaaagtggagctgggcatcgctgaaggtagcctgctcacttccgccatgctggtttacctttctccgctggcaggtctgttcgtgatgggcggggttttccagatgctgttcggcacagatttggccgccttgtgcggtgccgcgttgggcggggtgggcgggttctggcttgctaaaggcgtttccccaaggcttgccgcccgggaagcgtggcagcccgttatcctcagcgttgcactggcacccgaccaacttcgtgttgagacgctctcttctgaggcccggtaatctgccgggctttattattatttacatcgcaataaagaaaacgccgtctcttcgcgctatacctggctctaagtgcatttccagctgacgaggatgtagtgtagaatgctgcgttttcgcactgaaaaacgtcaggctaagaacagcggcctccaggaattcgtaaggcataattatttaactatatgaagaacatacgtaacttttcgatcattgctcacattgaccacggtaagtcgacgctgtctgaccgtattatccagatttgcggtggcctgtctgatcgtgaaatggcagcccaggttctggactccatggacctggaacgcgaacgcggtattaccatcaaagcgcagagcgtgacgctcgactataaagcttccgatggtgaaacctatcagctgaactttatcgacaccccagggcacgttgacttctcttatgaagtgtcacgctcgctggcggcctgcgaaggcgcgctgctggtggtggatgccgggcagggcgtagaggcccagacgctggcaaactgctacaccgccatggaaatggatcttgaagtggtgccggttctgaataaaatcgacctgccagccgccgatcctgagcgcgtagcggaagagattgaagacatcgtcggtattgatgcgaccgatgcagtgcgctgctcggcgaaaaccggtgtcggtgttccggacgtactggaacgtctggtgcgtgatattccgccgccggaaggcgacccggatgcgccgctacaggcgctgatcatcgactcctggtttgataactacctcggcgttgtctcgctggtgcgtattaaaaacggcaccatgcgtaaaggcgacaaaatcaaggtcatgagcaccggccaggtctacaacgctgaccgtctgggcatcttcacgccaaaacaggttgaccgtaccgaactgaaatgcggcgaagtgggctggctggtctgtgcaattaaagacatcctcggcgcgccggtgggcgataccctgaccggtgcacgtaacccggcagataaagcgctgccaggcttcaaaaaggtgaaaccgcaggtttatgcgggtctgttcccggtcagctctgacgattacgaaaacttccgcgatgcgctcggaaagctgagcctcaacgatgcctccctgttctacgagccagaaagctcaacggcgctgggctttggcttccgctgtggcttcctcggtctgctgcacatggagatcattcaggaacgtctggagcgtgaatacgatctggatctgatcaccaccgccccgacggttgtctacgaagtagaaaccacatcgaaagaggtgatctacgtcgacagcccgtccaagctcccgccgctgaataatattcaggaactgcgcgagccaatcgcagagtgtcacatgctgctgccgcaggagttcctcggtaacgtgatcaccctgtgtattgagaagcgtggcgtgcagaccaacatggtttaccacggtaaccaggtggcgctgacctatgaaattccgatggcagaagtggtgctcgacttcttcgaccgtctgaagtctacctcccgtggctatgcgtcgctggactacaacttcaaacgcttccaggcctcgaacatggttcgtgtggacgtgctgatcaacggtgagcgtgtggatgcgctggcgctgatcacccacaacgataacgcaccgtaccgtggtcgtgagctggttgagaagatgaaagatctgatcccgcgtcagcagtttgacattgcgattcaggcggccattggtaaccacatcattgcccgttcaaccgtgaagcagctgcgtaaaaacgttctggctaagtgctacggcggcgacgtcagccgtaagaaaaagctgttgcagaagcagaaagaaggtaagaagcgtatgaagcaggtcggtaacgttgagctgccgcaggaagcattccttgccatccttcatgttggtaaagacggtaacggtaaataaccttaaggagttggcatggcgaacatgtttgccctgatcctggtcatcgctaccctggtgacaggtctgttgtggtgcctggataagtttatcttcgccccaaaacgccgtgaacgtcaggctgccgcgcaggcagccacgggcgatgcgctggacgcgaaaaccctgaaaaaagtcggcccaaaaccgggatggctggagacaggggcatcggtattcccggtgctggcgattgtgctggtggtgcgttcatttatctatgaaccgttccagatcccgtcaggatcgatgatgccaacgctgctgatcggtgatttcattctggttgaaaagtttgcctatggcatcaaagatccgatctaccagaaaacgctgatcgaaacgggtcatccgaaacgtggcgacatcgtggtgtttaaatatccggaagatccgcggctggattatattaaacgcgcggtaggtctgccgggcgataaagtgacctacgatccggtggcgaaagaggtgaccattcagccaggctgtagctctggcaccgcatgtgaaaatgcgctgccagtcacttactccaacgttgagccagctgattttgtgcagaccttcgcccgccgtaacggcggtgaagcgaccagcggattcttccaggtgccaaaaggtgaaaccaaagagaatggcattcgtctggttgaacgcaaagagacgctgggcgatgttactcaccgcattctgaccgtgcccatcgcacaggatcagctggcaatgtactaccagcagccaggccaacagctggcgacctggattgtgccgccgggacactacttcatgatgggtgacaaccgcgataactctgcggacagccgttactggggctttgtgccggaagcgaatctggtcggtaaagcaaccgctatctggatgagttttgagaagcaggaaggcgagtggccgaccggcgttcgcctgaatcgtattggcggaattcattaattttcgccaaaaataacacgtagcggcttttattcgccgctacgtgaattatttcagcgataaatctctttgaactaacgacatcccctgtcgttgtgtatagaatattcccccgaagtttaaggttggccctgcaagggtgccacggcacacgaaaccgcgttggttttctcaggtcggtttcgtgtgctgcatttttgacgcattcatttattggtatcgcatgaaccccatcgtaattaatcggcttcaacggaagctgggctacacttttcatcatcaggagttgttgcaacaggcattaacccatcgcagtgccagcagcaaacataatgagcgtctcgagtttttaggcgactctattttaagtttcgtgattgcaaatgcgctttatcatcgttttccgcgcgtggacgaaggtgatatgagccgcatgcgcgccacgctggtgcgcggcaataccctcgctgaaatcgcacgcgaatttgagctgggtgaatgcctgcgtctggggccaggtgagctgaaaagtggtggtttccgtcgtgaatccatccttgccgatacggtcgaggcattgatcggtggtgtgttcctggacagcgatatccagaccgtagaaaagctgatccttaactggtatcagacccgcctggacgaaatcagcccgggcgataaacaaaaagatcctaaaacgcgtctgcaagaatatttgcagggtcgtcatctgccgctgccatcctatctggtggtgcaggtgcgtggcgaagcccacgatcaggaatttaccatccattgccaggtcagtggcctgagtgaaccggtggtcggcacgggttcaagccgtcgtaaggctgaacaggctgccgccgaacaggcgttaaaaatgctggagctggaatgagcatcgacaaaacctattgcggatttattgccatcgtcggacgtccgaacgttggcaaatccaccctgctgaataatctgcttgggcagaagatttctatcacctcgcgtaaggcgcagaccacgcgtcaccgcatcgtcggtatccatactgaaggcgcgtatcaggcgatctacgtcgatacaccgggcctgcacatggaagagaagcgcgccatcaaccgtctgatgaacaaggcggcgagcagctccattggcgacgtagagctggtgattttcgttgtggaaggcacccgctggacgccggacgacgaaatggtcctgaacaagctgcgcgacggcaaaacgccggtgatcctcgcagtcaataaagtggacaacgtgcaggaaaaagccgatctgctgccgcacctgcaatggctgggcagccagatgaacttcctggacatcgtcccgctgtctgcggaaacgggtctgaacgttgataccatcgcgggtatcgtgcgcaagcatctgccggaagcgactcatcacttcccggaagactacatcaccgatcgctctcagcgttttatggcgtctgaaatcatccgtgagaagctgatgcgtttcctgggcgctgaactgccgtactctgtgacggtggagatcgagcgtttccagagcaacgagcgtggcggctacgatattaacggtctgatcctcgttgagcgtgaagggcagaagaagatggtgatcggcaataaaggcgccaagatcaaaactatcggaatcgaagcccgtaaagacatgcaggacatgtttgaagcaccggttcacctggaactgtgggtgaaagtgaaatctggctgggccgatgatgagcgtgcgctgcgcagcctcggttacggcgaagatcagtaacctaagacgacgagcatatggatggatggcagcgcgcctttgtcctgcatagtcgtccctggagcgaaaccagcctgatgctggacgtcttcacggaagagtccggtcgcgtgcgccttgttgccaaaggcgcacgttccagacgttctaatctgaaaggtgccttgcagcctttcaccccgctgctggtccgctttggcgggcgaggggaagtcaaaaccctgcgcagtgctgaagccgtctccctggcgcttcctctttctggtatcacgctctacagcggtttgtatgttaacgaactcatctcacgggttcttgaacatgagacccgcttctctgaacttttctttgattacctgcactgtattcaggcacttgctggcgcaaccggcacccctgagcctgtgctgcgtcgtttcgaactggcgctgctcggacaccttggttacggcgttgattttctgcactgtgcgggaagcggagacgaggtagaagacaccatgacctatcgctatcgtgaggaaaagggctttattgccagtgtcgtcgtcgataacagcacctttaccgggcgccagctcagagcactgtatgaacgcgagttcccggacgccgacactctgcgtgcggcaaaacgctttacccgaattgcgctcaagccgtatcttgggggcaaacctttaaagagccgcgaattattcaggcagtttatgccgaaacgctaatgttttacccctcaccccagccctctcccggagggggagggagaaggtaaatgaacaaaaataccgaggattgtcatggctgaattactgttaggcgtcaacatcgatcacatcgccacgttacgtaatgcacgcggtaccgcgtatcccgatccggttcaggcggcgtttatcgctgagcaggctggcgccgacggcattaccgttcacctgcgtgaagatcgtcgccacatcaccgaccgggacgtgcgcatcctgcgtcagacgctggacacccgcatgaatctggagatggcggtcaccgaagagatgctggcgattgcctgcgagaccaaaccgcatttttgctgcctggtgccggaaaagcgtcaggaagtgaccaccgaaggcggtctggatgtggccgggcagctcgacaaaatgcgcgatgcctgcaaacgcctggcggatgccggtatcctggtttctctgtttatcgacgccgatttcacccagattaaagccgctgccgacgtgggtgcgccgtatattgaaattcacaccggctgctatgccgatgccgaaaacgatgcagcgcaggcgaaagagctggagcgaatcgccaaagcggcaacctacgccgcgagcctgggactgaaggttaacgccggtcacggcctgacctatcacaacgtaaaagccatcgctgccctgccggaaatgcacgagctgaacatcggccacgccatcattggccgcgcggtgatgagcggtcttaaagaagcggtttccgagatgaagcgcctgatgctggaagcgcgtcagtaatggctattctgggcttaggcaccgacatcgttgaaatagcccgcattgaagcggtgatcgcccggagcggcgatcgcctcgcaagacgcgtgctgagcgataacgaatgggctatctgggaggcgcatcaacagccggtgcgctttctggcaaagcgtttcgcggtaaaagaggcggcggcgaaagcgttcggcacgggcattcgtaacggcctggcgtttaaccagtttgaagtgtttaacgatgagctgggtaagccacgtctacgtttatggggcgaggcgcttaagctggcggaaaagctgggcgtggcgcacatgcacgtaacgcttgccgatgaacgccactacgcctgtgcgacggtgatcatcgagagttaaattttgtccgcatggtgcatcaggacaaacttatcccacagctgttcttcgttctcgacgtgtgccggatcttttaagatcgtattgggaatggggcacaccttctggcaggtcggcgtctcatagtggccgatgcattcggtgcagcggtcgctgttaatctcataaatgctgtcgcccatcgaaatcgcctcgttcgggcattcgggttcgcacatatcgcagttgatgcattttttggtgattaacagcgccatcaggaaattctcagaaacatcacaaacagggcgggcattatacgctcattcgttgttcagaccagtttttttaccagctcttcgctgtgacgaatacgctctggcgcacgctccagatcctgctgaaccagcgccataaacagcaggtccgtcagcatcatctgcgcactcgtcgacgaaatcgccgcactgcgagtggcctgttcctcggcaatggtatacagacagcgggtggcccgttgctggagcgcattcgggctgaagccagtaatcgccagaatttttcctcctacgcgcagggcttcgtcggtagccatattaatttcacgacgctcgccggaataggagatggccagcagtaaatcgtcaggatccatggcctgcacggtcgccagcagcgcgtgcatatcctgttcaacgatggcgttatagccgatttttgtcagcttccagccaaagttacgcgcaaccagtccggaggcgccgatcccggtcaatacaatacgccgcgcgtcgcgaagcatggctacgctttccagcagcttctcttccgtgttcacatccagcgtggcatgcattgccgccacgttctctttgatcagcttttcgccgaccagacgcatcggatcgtcgccgcggatctggttatgcaccggcattgactgcggattagggttgcttaccagtgcttcactgatcgccagttttagcgccggaaagcctttatagcctatcttctgggcaaatttcaccacgctcgactggctcaccccggcttcgcctgccagctgctgggagctgaggtgtcgcgcgcgatcgggctgggaaagtaaataatccgccagctttttgtcactctgggcaaaccctgcgtagcgctggcgaatacgaattaaacagttcatacggtctcctggcgaaaatgtgattacccgcgcaaatacgaattttgctcgcctgaatgaattttatattccattatagtgcgtttattatgaattaaaaattccagaggtaaataacatgaatctaggctctcttgtttctgaaacgcgtaacccgcaaaccatggatcttgatgcactgtccacgctggagctggtaaaccgctttaatcaacaggataccctcgtcgcgctggcagtcaaagagacattgcccgaggtggcgaaagccgtagacgccgctgccgacgctctgaaagcaggaggacgcattatttacatgggggcgggtaccagtgggcgactcggtgtgctggatgcctcagaatgtcccccgacctttggcgttccgcacggtctggtcgttggcctgattgccggtggccccggcgcgctgctgaaagcggtggaaggggcagaagacaataaacagcttggggaagacgatctcagggcgctgaacctgaccgcgcaggatctggtcgtcgggctggcggcttctggtcgtacgccgtacgtcattggtgggctggaatacgccagacagacgggatgtaccacggtggccatctcttgtaacccgggttcgccgattgcgcaggtggccgccattgccatctctccagtcgtcgggccggaagcgctcaccggctccacgcgcctgaaatcgggaaccgcgcagaagctggtgctcaatatgatctccaccggcgcgatggtgaaattcggcaaggtctaccaaaacctgatggtggatatgcaggccaccaacgtcaagctggtggacagagcctgccgcatggtgatagaggcgacaggggcaggtcgggaagaggcggaagcggtactcaaacagaccgattacgacgtcaaacccgccattctgatgatattaaccgggctggatgcagccgcggccagagccaggctcgaagcccatcacgggtttttacgggcggcattagaacaccaataagaggcgtgtatggacaaaacagcagcgctcgccagcgacatcctgcttgggatcggtggggaaaaaaatattcagcgtctggaaaactgcatgacgcgtgtacgcgtcgaggtgcacaacgacgaaaagcttgatttaacgcgcctgaagcagctccccggcgtgagcgggtacgttaaacaggggcaacagcaccagctgattgtcggtccgggcaaagcggcgcaggtggttgatgccatgcgcgccctgatgacgggcagtgaaacggctcccgcctttgacgacgcggaacgcaccaaagcgcaggcgaaagccaaatacaaagcccccatgagcgatgcgctgcgccagctggcaaacgtctttattcctctgatcccggcgtttatcgcatcggggctgatcaccgggattatcaatatcctcaagcgtccggatattgtcgggaatttcgccacccagtatccgaacctgctgggtattctggcgattttcggcagcgcggtgtttgccatcatgaacattctggtgggggtaaacacggccaaagtgttcggcggctcgctggcgatgggcggcgtaatggcgggtatcctctccagcccgcagctggcgcagattacgctgtttggcgaggcgcttcagccaggccgcggtggggtgattgccgtgctgctggtggtcattctgatgtgctggatcgagaaaaagctgcgcgcgttgctgccaggctcgattgagctgatcctcaacccgctgctgaccacattgattaccgggagcgtggcgattgtggcgctgcaaccgttaggcggcgcgatctctgaagccatcgcccacggcgcgtctctggcgatcgatcgcggcgggctgctggtgggggccgtgctgtccgggaccttcctgccgttagtgctgaccggtctgcatcaggggctggtgccgatccacgtcgaactggtacaggcgcacggctataacgcactgctgccgatcctgtcgatggcgggcgttgggcaggtcggcgcggccatcgcggtgctgatgaaaacccgcaacgcgcgtctgaaaaaggtcattaaaggggcgctgccggtcgggttactcggtatcggcgaaccgttgattttcggcgtgaccttgccgctgggtaagccgttcctggccgcctgcctcggtggcgcggtgggcggggcgttaatcagctactggaaagtggcgaccgtcattaccttcgggatctccggtttaccgctggcattaaccatcgtgaccggaaaagtgatgctctatctgttaggctatctggtagcggtgatcgccgggttcctgtttacctggctgttaggattcaacgacccagaggagtaaggtttggccagtcacgagcgtcgcgttgtcttttttgatctggatggaacgctgcatcagcaggatatgttcggcacctttatgcgctacctgctgcggcgccagccccttaacgcgttgctggtattacccctgttacccgttattggtatcgcgctgctggtgaaaggccgtgcagcgcgctggccgatgagcctgctgctctggggatgcacgtttggtcatagcgaagcgcgccttaagcagctcgaacaggattttgcgcactggtttcgcgggcacgtcgccgcgtttcccgtggtacaggcgcgcctgaccagctatctcgacgccaacgatgccgatatctggctgattaccggctccccgcagacgctggtggagcatgtctattttgatacgccctggctgccgcgcgtgaatcttatcgcgacacaaatcgcgcgcggctacggcggctgggtgctgactatgcgctgcctcggacatgaaaaagtggtgcagctggagaaacgcatcggtacgccgctgcgtctgtacagcggctacagcgacagcaagcaggacaacccgctgctctatttttgccagcaccgctggcgcgtcacgcctctgggcgaacttcagcaactcgaatagtcttatctgtaccggctgtgtataatgccgcccgcttttcgactggagtatcagcccttgtccaaccctgaacacaatcatgaatactggatgcgccatgcgctggcgctggctcagcgcgcctgggaagagggcgaagtgcccgtgggcgcggtactggtccataacaatcaggtgattggggaagggtggaaccgtccgattggccgtcacgatcctaccgcgcatgctgaaattatggcgctgcgtcagggcggactggtgctgcaaaactatcgtctgcttgataccaccctgtatgtcacccttgagccgtgcgtaatgtgctccggggcgatggtgcacagccgaatcggtacgctggtgtttggcgcgcgggatgaaaagacgggcgctgctggttcactgatggacgtacttgggcatccggggatgaaccaccaggtgaaaactatcggcggggtacttgcaccagaatgttcgggtctgttaagtgacttttttcgaatgcgtcggcagcagaaaaagcaacaaaaggcagaattgaaaccgcaggatgattaagctcgtccggtgcgaccaccggatagctttcagccagctgttgcgcctcggccgcctctttttctttctccagcagatatcccaccaggcttatctggtacttacgaatattttccacgtaggcatacgcttcatgcccgcgcgcatagccgtacgtcagcttctggtaccactgtttctggctaagcagcggcaggcgctgttttacatctgaccagctgtccggattacctttagttttcgccgtcagcgcccgcgcgtcgagcatgtgcgcataacccatgttataggcggccagcgcaaaccagatacgctccccttccgggaccgtctccggcactttcgccatcatatcctgtaaatactgcgcgccgccgctgatgctctgttccgcatcggtccggtcgctgatgccgaggctctgggcggtatttttggtcagcatcatcaacccgcgcacgcccgtgggtgaggtggcctgagcatcccagtgcgattcctggtaggaaattgccgccagcagcttccagtcaatctcctcggcgtacttctcaaacagcggttgcaggtccggcagcacactgtccaccgcgcgcaggaaagtgcgggtgtcaacgtaatcaaaatcgtccccgtgaccgagatatttctcttccaggcgcgccagggtgccgtcttcattgatggaattaaagaaatcgagcatagccgcagagacggtttgatcgtcatccagctgggtaaaccaggtcaccggctgttcgtcggtcacatccagcgccacggcgatttcaggatgaacgcgctggaaaaggctaatcgccaccgaatcagcaatggtataggccagctttttatctttaacctgctccagcaattcggtcgtgccgagtttaggatcgaccgtccagctgaggttagggtattttttctctttcaacgctcgcagatcgtcaatcaccacatggcctggcgcaatggtcaattgctggtcggtgatgtcggccagtgagcgcggacgcaggctacccacacgataaaccacctgctgcgacacggagtaataggtcgggcccggctgatagtttttgctgcgttcgctgttgtacaccagacctgcggcgagaatatcggcacggtcatggtccaaatcatcaaacagctggttgatgttctgccgcacggtaactttcagcttcacgcccagatagtctgcaaacagctgtgccagttcgtaatcaagaccgatggttttaccgttgatatcatcgtaaataagcggggaggagagggtactgacgcgcaactccccccgctcctgaatggcggcgatacggttttcggccttgccgaaccaggggatagacggccagagggccactgccagcagcaacgtaacaatgccgatgagcagataattaatctttaattttttcaattagttaattctctgcgacgccggttgcctcagtgtgctgtagtcatgttaagagtagagtttgccattgattgagcggcattttgcgcaaagtagcgccagttggcaaccaattagagagacaggtcacatctattgttaaacataaaggatgattttatttcgacgcaaacggtttcgtcggcgctcaggattctctataatgacgcccgttttccccccttgcgcacactgtaagcgccccggcgcttcgaagacgagagacttatgatggaaattctgcgtggttcgcctgcactgtctgccttccgtattaacaaactgctggcacgttttcaggcggccgaccttccggtaagcaatatttacgctgagtatgtccattttgctgacctgaacgcccccctgaatgcagaggagcgcgtacagctggaacgcctgcttaaatatggcccaagcctgagcagccatacgccgaccggcaaattaatcctcgccacgccacgccctggcaccatctccccctggtcttccaaagccaccgacatcgctcacaactgcggcctgagccagattaaccgtctggagcgcggtgtggcgtactatgtggaagcgtcaaccctgagcgacgcgcagtggcaggtggttgccgcagagctgcacgaccgcatgatggagagcgtgtttgattctctggatgatgcgcagaaactgttctcccaccatcagcctgcgccggtacagagcgtggatttgctggggcaggggcgtcaggcgctgatcgacgcaaacctgcgtcttggtctggcgctcgcagaagatgaaatcgactaccttcaggatgcattcgttaagctgaatcgcaacccgaacgacatcgaactgtatatgttcgcgcaggccaactccgagcactgccgccacaagattttcaacgccgactggattatcgacggcgaacagcagccgaagtcgctgttcaaaatgatcaaaaacaccatggagcaaacccctgaccacgtgctgtctgcctataaagacaacgccgcggtgatggaaggttccgaggtgggccgcttcttcgccgaccgcgaagcggggcgctatgacttccaccaggagcctgcgcatatcctgatgaaagtggaaacccacaaccacccgacggcgatctccccgtggccgggtgcagcgaccggctccggcggtgaaatccgtgacgaaggtgcgaccggtcgcggcgcgaaacccaaagcgggtctggtcggtttctccgtttccaacctgcgtattccgggctttgagcagccgtgggaagaagactnnnnnnnnnnnnnnnnnnnnnnnnnnnnnnnnnnnnnnnnnnnnnnnnnnnnnnnnnnnnnnnnnnnnnnnnnnnnnnnnnnnnnnnnnnnnnnnnnnnnnnnnnnnnnnnnnnnnnnnnnnnnnnnnnnnnnnnnnnnnnnnnnnnnnnnnnnnnnnnnnnnnnnnnnnnnnnnnnnnnnnnnnnnnnnnnnnnnnnnnnnnnnnnnnnnnnnnnnnnnnnnnnnnnnnnnnnnnnnnnnnnnnnnnnnnnnnnnnnnnnnnnnnnccgctgggcggcgcggcgttcaacaacgaatttggtcgtccggcgctgaacggttacttccgtacctacgaagagaaagtggacagccacaacggcgaagagctgcgcggctaccacaaaccgatcatgctggcgggcgggatcggcaacattcgcgccgatcatgtgcagaaaggcgagatcgtcgtcggcgcgaagctgatcgtgctcggcggcccggcaatgaacatcggtctgggcggcggggcagcctcgtctatggcctccggccagtctgatgcggatctcgacttcgcgtccgtgcagcgcgacaacccggaaatggagcgccgttgtcaggaagtgatcgaccgctgctggcagctcggcgatgccaacccgattctgttcatccacgacgtgggcgcgggtggactctctaacgccatgcctgagctggtgagcgacggcggtcgcggcggacgcttcaacctgcgcgatatcctgagcgatgagccgggcatgagcccgctggaaatctggtgtaacgaatcccaggagcgctacgtgctggcggttgccgccgatcagctgccgctgtttgacgagctgtgccgccgcgagcgcgcgccgtatgcggtcatcggtgaagcgaccgaagagcagcacctttccttaagcgacacccactttgacaaccagccgatcgatctgccgctggacgtgctgctcggcaaaacgccgaagatgacccgcgacgtgcagactcgcaaagcggcgggcaaagcgctggatcgccagggcatcaccgtggcagaagcggttaaccgcgtgctgcacctgcctgccgtggcagagaaaaccttcctggtgaccatcggcgaccgtaccgtgaccggtatggtatcgcgcgatcagatggtcggcccgtggcagatcccggtcgctaactgcgccgtgaccaccgcgagcctcgacagctactacggcgaagcgatggcgctgggcgaacgcacgccagtggcgctgctggacttcgccgcttctgcccgtctggcggtcggtgaagcgctgaccaacatcgccgcgacgcagattggcgatatcaaacgcatcaaactttccgcgaactggatggccgctgccggtcacccgggcgaagatgccggcctgtacgaagcggtgaaagcggtgggtgaagagctgtgtcctgcgctcggcctgaccattccggtgggtaaagactccatgtcgatgaaaacccgctggcaggaaggtaacgagcagcgcgagatgacctctccgctgtcgctggtgatcaccgcgtttgcgcgcgtggaagacgtgcgtcataccgttacgccgcagctttccactgaagataacgccctgctgttgattgacctcggcaaaggccataacgcgctgggcgccaccgcgctggcgcaggtttaccgccagctcggcgataagccagccgacgtgcgcgacgtcgcccagttgaaaggcttctacgacgctattcaggcgctggtggcgcagcgtaagctgctggcctaccacgaccgttccgatggtggcctgctggtgacgctggcagagatggccttcaccggtcactgcggcgttgaagcaaacattgcaacgcttggcgaagaccgcctggcggcgctgtttaacgaagagctgggtgccgtcattcaggtacgcgccgcagatcgcgacgcggtggaagcgattctggcgcagcacggtctggcagactgcgtacactatctcggtaaagcggtgcagggcgaccgtttcgtgattgaagccgacggccacgcggtgttcagcgaaagccgcaccacgctgcgtatgtggtgggcggaaaccacgtggcagatgcaacgcctgcgtgacaacccggaatgcgccgatcaggaacacaacgcgaaggcgaacgacaacgatcctggcctgaacgtgaagctctccttcgacattaacgaagacattgccgcgccgtacattgcgaccggcgcgcgtccgaaagtggccgtgctgcgtgagcagggcgttaactcccacgtggaaatggcggcggccttccaccgtgcgggctttgacgccatcgacgtccacatgagcgacctgctggccgggcgtaccggtctggaagatttccaggcgctggtggcgtgcggtggtttctcctacggtgacgtgctgggcgcgggcgaaggctgggcgaagtctattctgttcaacagccgcgtgcgtgacgagttcgagaccttcttccaccgtccgcagacgctggcgctgggcgtgtgtaacggctgccagatgatgtctaacctgcgcgagctgatcccgggcagcgaagcctggccgcgctttgtgcgcaaccagtctgatcgtttcgaagcgcgcttcagcctggtggaagtgacccaaagcccgtctctgctgttgcagggaatggtgggttcgcagatgccaatcgcggtttcgcacggtgaaggtcaggttgaagtgcgtgatgcggcgcacctggctcagcttgaaagcaaaggactggtagcgctgcgctttgttgataacttcggcaaggtcaccgaaacctatccggctaacccgaacggttcggcaaatggcattaccgcagtcaccagcgaaagcggtcgggtgacgatcatgatgccgcacccggaacgtgtcttccgtaccgtgagcaactcctggcacccggaaaactggggcgaggacagcccgtggatgcgcattttccgcaacgcgcgtaaacaactgggttaagtttcaacgcactgactgtaggcccggtaagcgcgagcgccaccgggcttttttgtacctgtcgcaaaatcgcgacaatcctctgggttgagtgtctccaataagagacatttaacttattgatttatatatgtcaggacaggttcccgttaaggtgttgcttaatagcgacacttagcctggaaatcattcacctgacaatcaatgcattttaataataaaatgattattaatcataaggatagtatcaatttttgcaatctggcacgcgcgttgcataatagtaaccagtggctcattcaccttcttatgtcagccccttcgggacgtgctacataaacttcgaatgacgcacaaaaaggtgcctgccgtccaactactgattattgcaatgctttatcaggccagggcgaaacgtcgagttaggcaccgccttattccatgacaaagccgggtttttacccggctttgttgtatctgaagggcagactcagttacgctctcctcaaacccggatgatgagagtaatgtgttgaaacgctggcccgctttccctcgctccctgcgacagctcgttatgatggccttcctgctgatcctgctacctttgctggttctggcgtggcaggcatggcaaagcctgaatgcgttaagtgcccaggcggccctgactaaccgcaccacgcttattgatgcccgccgtagcgaggcaatgaccaacgccgcgctggagatggagcgtagctatcgccagtattgcgtgctggacgaccgcacgctggagagggtttatcagaaccagcgtaaacgctacagcgaaatgctggatgcccatgccggggtcttgccggatgacaaactctatcaggcgctgcgtcaggatctgaacgatctggcgcagctccagtgcaaaaacagcggtcctgatgccgccgccgccgcccgacttgaagccttcgcgaacgccaatacggagatggtgcagtccacccgtacggttatcttttcccgtggccagcaactccagcaggagattgccgagcgcggccagttcttcggctggcaggcgctggtgctgttcctcgtcagccttgggctggtactgctctttacccgcatgattatcggccccgtaaaggggatccagcggatgattaaccgcctgggggagggcaaatctctcggggatacggttgtttttaaaggcccgcgcgagctgcgctcggtcggtcagcgtatcatctggctttctgaacgcctggcgtggctggaatcgcagcgtcatcagttcctgcgccatatctcacacgaactcaaaacaccgctggccagtatgcgtgaaggcacggagctgctggcagacgaagtagcggggccgttaacccctgagcaaaaagagatcgtggcgattctggatgccagtagccgcaatttacaaaaacttattgaacaactgctggactataaccgcaagctggcggatggtgctgtggtgcttgaaagcgttgagattgaaccgttggtggacatggtgatctccgcccatagcctgccagcaagagctaaaatgatgcatacccaggtggatctcaatgcgccttcctgcctggcagagccgatgctgttaatgagcgtactggataatctttattccaatgcggtgcactatggtactgaatccggtaccatttatatcagaagcaataacaacggttcgcgggtatttattgacgtagcgaatacgggaagcccgattccggatgatgaaaaaacgatgatctttgagcccttcttccaggggagtcatcagcgaaaaggtgcggtaaaaggaagtggtctggggctgagtattgcccgcgactgcatacgacgcatgcagggtgagcttaacatcgtgagtgatgaacgcgccgatgtctgttttcgtatcgaactgcctcttgagccggaaaaatcaatgaaatgaataacaacctggtgagtatgtcacacgtcttttaccgcgcactgcgcgcggtgttttccagcaaaaatgtgcgcctgagcctgccctgcttactgctggccggctgtgtaacccatgcgccgaaaagtgcaattagccacaaacaggaagataaatggccgcaaaaacagctggccgatttcctttcaacacgttgcgatgatatctggaacctgtcggggcgtgatgttgaatccaatccgctgttctggctgcgcggaatagactgcgcccagcggctggcgcccgccgaggcccgtgcccaggcggcgatgctggtggacgatacctggcaggacgcgtttaaacgtgggatcgtgatggcggatgccagaatcacgcctgtcgaacgccgcgccaacgtgacgcggctggatacttacgtgatcaatattcccccgcaggtgcgcccggtctatcagctctggcgggatggacaaaccctgcaattacaactgtctgaagagcgtttccgctacagcaaattgcagcagtcgagcgacagcgagcttgatgcgcttcgccagcagcaggagtcgctgcgcgagcagctggaaaccaccacccgcaagctcgaaaatctgaccgatatcgaaagacagctctcgacgcgtaagccggcaggcagctatctgcccgatgggtcgaaaggcaactctgccacgacgccagacagtgagacgccgaaacaagaggatgtgaagccatgacaagccgtaaacctgcccatctgttactggtggatgacgatcccgggctgttaaagctgctgggaatgcgtctggtcagcgaaggctacagcgtggtcaccgctgaaagcgggcaggaggggctgaaagtgctcagccgcgagaaaatcgatctggtgattagtgatttgcgcatggatgaaatggatggcctgcaactgttcacggagatccagaagcagcagcccgggatgccggtgattatcctcaccgctcacggatctattcctgatgcggtggccgcgacgcagcagggggtattcagcttcctcaccaaaccagtggataaagacgccctctataaagcaatcgacagcgcccttgagcatgcggcgccatccggcgacgacgcctggcgtgaatccatcgtgacgcgtagccctgtgatgctgcgcctgctggaacaggcgcggatggtggcgcaatccgacgttagcgtgctgatcaacggccagagcgggaccgggaaagagatcctggcccaggctatccacaacgccagcccgcgcagtaaaaatgcctttattgccatcaactgtggcgcgctgccggaacagctgcttgagtctgagctcttcggccatgcccgcggcgcctttaccggcgcggtgagcagccgtgaagggctgttccaggcggctgaggggggcacgctgtttcttgatgaaattggcgatatgcccgcgccgttgcaggtcaaactgctgcgcgtgttgcaggagcgaaaagtgcgtccgcttggcagcaaccgcgatatcgatatcaacgtgcgtattatttccgctacccatcgcgatttacccaaggtgatggcgcgcaacgagttccgtgaagatctttactatcgactgaatgtcgtcaacctgaaaatcccggcgctggccgagcgtgcggaagatatcccgctgctggcaaatcaccttttgcgccaggccgctgaccgccacaaacccttcgtgcgcgcgttctccaccgatgcgatgaaacgtctgatgaccgcaagctggccgggcaacgtacgtcagctggtgaacgtgattgagcagtgcgtggcgctgacgtcatcgccggtgatcagcgatgcgctggtggagcaggccctcgagggggaaaacacggccttgccgacctttgcggaagcgcgaaaccagttcgagctgaactatctgcgcaagctgctgcaaatcaccaaaggcaacgtaacccatgcggcgcgcatggccgggcgtaaccgtaccgagttttataaattgctctcacgccacgagctggaagcgaacgattttaaagagtaataccgcaaaattcgcctgaatatgatactgtgagcaaccgattacgaggctgcttactggcaagagtttaaggacccaccatgaaaaagattgatgcgattattaaacctttcaaactggatgatgtacgtgaagcgctggcagaagtaggcatcaccgggatgaccgtaactgaagtaaaaggttttggtcgtcagaagggccacaccgagctataccgtggcgcagagtacatggtggactttctgccgaaagtgaaaatcgagatcgtggtgagcgatgatatcgtcgatacctgtgtggacaccatcatccgcacggcgcagaccggcaaaattggcgacgggaaaatcttcgtctttgacgtggcgcgtgtgatccgtatccgtaccggcgaagaagacgacgcggcgatttaacattcttgccgggtggcgctgcgcgtacccggcctacaaaacccttcgtaggcccgtgcaagcgcagcgccgccgggcgattacagcactttatgcgggccgaaacattcgtaatgaatgttgtctttattcacgcccaggtctaccagctgcttcgcggcatactgcataaacgctaccggcccacaaacgtagaactgcatccccggtgcgctgaacgccccttcatgctgccctaaattcatcaggccttcgctgtcgaaacgagccgctgcgcggtctgcctccgtcggcaggcgataccaggtatgcgcggtgaaacgcggcagggtcgctccgagcgctttgacttcatccgcaaaggcgtgcacatcaccgttctccgccgcgtggaaccagttaacctgcgcgctgtggtttgctttcgccagcgtatccagcattgccagcattggcgtctgacctacgcctgcggagatcaacgtcaccggggtattcgtttcaacggccataaagaaatcgcccgccggtgccgccagatggaccacgtcgcccacgctggcttcgttatgcagccagttggatacctgaccgccttcctcacgtttaaccgcaatgcgatagcctttgccgtctggcttgcgggtcagggagtactggcgaatctcctggtgcgggaagccttcaggcttcagccagacgcccagatactggcccggctggtaatcggcaaccggctgaccgtccactggctcaaactcaaagctggtgatcagtgcgctgcgcnnnnnnnnnnnnnnnnnnnnnnnnnnnnnnnnnnnnnnnnnnnnnnnnnnnnnnnnnnnnnnnnnnnnnnnnnnnnnnnnnnnnnnnnnnnnnnnnnnnnnnnnnnnnnnnnnnnnnnnnnnnnnnnnnnnnnnnnnnnnnnnnnnnnnnnnnnnnnnnnnnnnnnnnnnnnnnnnnnnnnnnnnnnnnnnnnnnnnnnnnnnnnnnnnnnnnnnnnnnnnnnnnnnnnnnnnnnnnnnnnnnnnnnnnnnnnnnnnnnnnnnnnnnnnnnnnnnnnnnnnnnnnnnnnnnnnnnnnnnnnnnnnnnnnnnnnnnnnnnnnnnnnnnnnnnnnnnnnnnnnnnnnnnnnnnnnnnnnnnnnnnnnnnnnnnnnnnnnnnnnnnnnnnnnnnnnnnngggttttctcaacgatgcggaaggcgcgcgtgccttcccagccgccattcttgctggcgttttcgctgtagatctgcgcttcacggttgatgaatacgtttgccagtacgccataggccttaccccaggcatccagtacttcctggcccgggctgaacatttcgtccagggttgccagcagatgactgccgacgatgttgtactgctcaggtttgatctggaagctggtgtgcttctgggcgattttttccaccgcaggcagcagagccgccaggttttcgatgttgctggcataggcggcaatagcgttaaacagcgcttcgcgctgatcgccgttacgctggttgctcatgttgaaaatctctttgagctccgggttatgcgcgaacatgcgatcgtagaaatgggcggtcagtttaggacccgtttcaaccagcagggggattgtggctttcacggtagcgatggtttgggcgtcgagcatagcagcttccttctgatgttactttaatgatgtattttatatgcatcttataaaaatacccctgcaatgtaaatggttctttgcatcgtgaaaaatatgcatcacaaagctgaaaagaaatccgttgaaaatggcgagagctttattgctcaaacccttgcgtggcgtggaggtaaacgtttgcgtaaaatcgtttgtcaagacctgttatcgcagaactattcagttatactgttgcccgtcgtccaacaggactgccttttcaggccaaaaatttacttgttagctgagtcaggagatgcggatgttaaagcgtgaaatgaacattgccgattatgatgccgaactgtggcaggctatggagcaggaaaaagtacgtcaggaagagcacatcgaactgatcgcctccgaaaactacaccagcccgcgcgtaatgcaggcgcagggttctcagctgaccaacaaatatgctgaaggttatccgggcaagcgctactacggcggttgcgaatacgttgatatcgttgagcagctggcgattgaccgtgcgaaagaactctttggcgctgactacgcgaacgtccagccgcactctggctctcaggctaacttcgctgtttacaccgcgctgttgcagccgggcgatactgttctgggtatgaacctggcgcagggcggccacctgactcacggctccccggttaacttctctggcaaactgtacaacatcatcccttacggtattgatgagtccggtaaaattgactatgaagacatggcgaagcaggccaaagagcacaagccgaagatgatcatcggtggcttctctgcttactccggcatcgttgactgggcaaaaatgcgtgaaatcgctgacagcatcggtgcgtacctgttcgtcgacatggcgcacgttgccggtctgattgcggcaggcgtttacccgaacccggttccacatgcgcacgttgtgaccaccactacccacaaaaccctggcgggtccacgcggtggtctgatcctggcgaaaggcggtgacgaagagctgtacaaaaagctgaactccgccgtgttcccaagcgcccagggcggcccgctgatgcacgttattgccgcgaaagccgtcgcgctgaaagaagcgatggagccagagttcaaggtttatcagcagcaggttgctaaaaacgccaaagcgatggtggaagtgttcctgaaccgtggctacaaagtggtctctggcgggactgaaaaccacctgttcctgctggacctggttgataagaacctgaccggtaaagaagctgacgcagccctcggtcgcgccaacattaccgtcaacaaaaacagcgtgccaaacgatccgaagagcccgttcgtgacttccggtatccgtatcggttctccggccgtaactcgccgtggctttaaagaagcggaagtgaaagagctggcgggctggatgtgtgacgttctggacaacatcaatgacgacgcggttatcgagcgcgttaaaggtaaagttctggacatctgcgcacgcttcccggtgtacgcataattctctgcgtcgcagaactgaagaaggccgctcatgcggcctttttttatgggctaacgtcggtcgagggagatggcccccggcccggtaatcgccagcaaaataaagccgccagcgatacttacatttttgtagaagttaatcatatttggcagaaccgcatcgcccgtcatatcccagtagtggtgaccaatcaccgctgttcccagcgtatagaagacaaagatcaccgcgagggggcgggtgaaaaagcccagcacaatcagaatcgcggcggggacttccatcaccaccgcaacaatggcggccagcatgggcatgggggcgccgagcgacgtcatatactgaacggtgccgctaaaccccgtcagcttgggataaccgaaaataataaacaggaccacaatagcaatgcgggcaattaaaagcaggaaagaacgagaggagccgaaatcgaaataacgtaagttgttcatggcaaacgacctcttcaggcgatgttctttaaacgtaatacaattttgccgctctcgccatacgccgaccggctgtccatgatgttaatttatcgttaatttatagcgcgctaacgacttgctaaagtcagggattaacgccagactatcgcctccatttcgggagggattcatggtcttgcattccacgcgctggctggcgctcagctatttcacctatttctttagttacggtatttttttgcctttctggagcgtctggctcaagggaattggtctgacgcctgagaccattggcatcctgctgggcacggggctggtggcacgtttcctgggtagcctgctgattgcgccccgcgtcagcgatccctccttactgattaaagcggtgcgaattctggccctgctgacgctggtctttgcggcctgcttctgggtcagccatcagtttgcctggctgatggtggtaatggttggctttaatctgttcttctccccgctggtgccgctgacggatgccctggcgaacacctggcaaaagcagatcaccatggactatggccgcgtgcgcctgtggggatcgattgccttcgtgatcggctctgcgctggtcgggaaacttgtcagcctctatgactatcgtgccattctggcgctgttaacgctcggcatcgcctcgatgctgctcggtatgttgctgcgtccgtcggtgatgccgcagggcgaaagccgccatcaggagagcgccggctggcccgcctggcgctcgctggtggcgcaaagctggcgtttcctggcctgcgtctgtctgctccagggggcacatgcggcctattacggcttcagcgccatctactggcagggggcgggctactcggcttctgcggtaggctacctgtggtcgctcggcgtggtggcggaggtcattatcttcgcgctgagccaaaaacttttccgtcgtttcggggcgcgtgacctgctgctgctttccgccgtttgcggcgtggtgcgctggggcatcatgggctggacgacggagctgccgtggctgattgtggcgcaaattctgcactgcggaaccttcaccgtgtgccatctggcggcgatgcgctacatcgcggcgcgagagggtggggacgttattcgtcttcaggcggtctattcagcggtggcgatgggcggcagtattgcggtgatgaccgtatttgccggtttcctctatcagcacctggggcacagtgtgttctgggtgatggcgctggtcgctttacctgccatcgtcatccgcccaaaggtggctgctcgctcgtaactatgattcgagcataacgcgaatatgttcctgctgctgcgtgttcagggcctcaacggcatgaatgagcggcggcgagaacagcggcagggcggttggataaggcgtaatgaccagcgccgcctcgcggggggcgccctccttcttaaacgcctccaggctaagataacgaatattgagcggcagcagcgtcagctcgcgaagctgctgctcaattaacgcttcgcaggctttatcttcccccgttaacaggaccacctgtttttcatgcaggtcggtctcctgcatcagccaggcaccaaaaatcaccgccaccagagccatctcttcaccggagaatcgcagaccaaattcggcttccagctcaaacagcgcctctttagtggtgcgcagcagccgggggtataaacggtggatctcttccggcagactgttgtcgatgccgatgtcaaataaggagcggtccagcgcctgagccagatgaatataaagctgatcggtcagcccttgctcatcgctgaagttcatcccggtttgcgcccggaaacgggcaatcatacgcacgatggcgcgacgcaggcgctgatcctgctggtgtttatccatcaccgggtcgggtgtgcgaagcatcataaacagcagcgccaggaacagctgttcatcgctatgcgttccctgcgggacgcgccgtttccagtggcggacaatttcctgcgccgtaaagtattcccctcgggactgcgtccagctgcgctgaacgggcgaaaactctggcgtattgcccagatgatgctgaatcagacaatattgcagataaagctgtaaaaactgtacgtcgcgggactcaaactggcgctgaagcttgcgcgcgcaaaagttgataagcgcccgaaggttcgcatcgtcataaagcgggcgggcaatgccgtgctgtttaagcgcggtttttaaggcaggggtaaactgttgggcgacaaaatgtggacagagccgaagtgccctgcgcagccagtgcagcaggcacaaacgttgattcagggcggaaccctcaattcggtagcagccatcatggtgcgtgacgatatcaagccgatgatagcgctggatttcatcgcgcgtctcggctatatcttgccgtgccatgacgtcgtccacgccgttggcagcgattatgctctgtgcggtgatggcagcatcgggcaggtaaagcatcaaaagcacctggcagcggcgctgcgaactggaaagcacagatggaatttcaagcgtcgtcatcatctgtcgggtatccagtgtgaatgtttgataagaatagctaaaggatgggcgctgaaaagcgcaccggcaggcctttcactcaggattgctggcgaacatcacagaatttttgacgtgaggaacagatgcaaatagttaaacaaagcgcggtagcgttatttttggcggttttcacttgtgccgccggcgcacatcctcacagttttatcagcctgaaaaccgaactggtgacggacggcacgcagctcagcggcctgaaaatgcgctggacgatggatgaaatcacctccgccgacctgctgtacgatgccggaaacgcaaagcccggcgatgagatctggaaaaagctggcggcggaagtgatggccaacgtgctgggtcagcactacttcaccgagttctggcacaacggacaaaaggtgaaatttctcaaccgtcccacggtgtacggtatgacccgctacggacatcaggcggtgctgacctttatccttccgctggcgcaccctcaaccgctggccgggcagaagtacaggttttccacgtttgacccaacctactatgtcgatatgcgctatgacaatgacagcgacgtacggctgccggacgcgctgcaaaaaagctgcaaaattgccgtgcacaccccgaaacccagcgaagagatgctgaactttgccgtttctcttgataaagaggatgcgccccccgaagacatggagttaggtaaacagtttgcgcaggaggtgacgttacaatgtcagtgatctcctctcccgtcagtaagccgcgtcgctggctgcatctctggcctctggcgctctttttgttgtttgcggttggcggcgcgctctggttgtggcaggcatggccgcaggtgatgatgaaaagcatcctctggcagcgggaagttaatcagcagatgagcggtctgctgaaagccgtggcggaaaatccgaccaaagcgggcggcgctcttctggcgttcagctttatctatggcgtgctgcatgccctggggccggggcacggcaaaatcgtcatcacgacctggcttgccacgcatccgtcgaagctgaaatcgagtatcggcctgacgctggcttcttctttacttcagggcggtgtggcgattgcgctggtcgtggtcgtcctttcgctgctacagctgccggcccgccagctgcatatgagcagcttctggctggagaaggggagttacgcgctggtaggcgtgctggggctgatcctctgctggcgggcgctgaaaaaattgcgcgcgttgctgcgaaaaccaaaattcaaatcctttacaccgcatcacgttcaccatgaaaactgcgggtgcgggcatcagcatctgccgacgcaggaacaattacagaacagtgaggactggcgtgcgcgcctgatgattgttctctcaatggggatgcgtccatgctcgggcgcaatcatggtgctgttgttcagcaaagtgacaggcgtatttggctggggcatgctctcggcgctggcgatggcggcgggaacgtctctgacgatctcttcgttagccctgctggttcacagcttccgtcagctggcggtaaaactcagcggcaataaaacgccggtattgtggcgacaggttggctggacgacgctggcgctggcgggcggggtgattctgctggtagcggcggtgacaatgtggatgagtgcggtgccggtgggaagggggttgcggcctttctagccgtatctgaggcgtgttgtaggcccggtaagcgtggcgccaccgggcttaacagactgaattaacgcttcagcgcatcgctcagttcatcacgcatgtttgccagcatggctttaacaacgcgcgggttacctgcaacgatgttgccggtagacatatagttatggccgccggtgaagtcgcaaacaatcgcgcctgcttcacgagcgatcagctcgcccgccgcgaagtcccacggcttcagagacagctcaaagtaaccgtcaacgcggccggtcgcgacgtaggccagatccagtgcagcagagccggtgcgacggaagtccgcgcattcggtgaacagcttgcccaggatattcatataagtggttgcgtgctgcttcgccttgaacgggaagccggtcgccagaatcgtgccgtccagatcgcgtgcattgctgcaacgcagacggtagccgttcagctgcgcgccctgaccgcgggtcgcggtgaacagttcgttacgcattggatcgtaaacaacggcgacttcagtacggcctttgatgcgtactgcgatagacacagagaagtgtggcaggcgtttgacgaagttggtggtgccatccagtggatcgataacccattgaacatcctgatcggtaccttcatgttcaccgctttcttcggtgatgatggtgtgctgcgggtaagatttgcggatcgtttcgataataatcgcttctgcggctttatctacgttcgtcacgaaatcattgctgcctttctggctggtttctacggagtctggggtttcgtagtgtttggcaattacattacccgccttgcgcgctgcgcgcacggcgatggtcagcatcggatgcatcggtctctctcactggatgttaaagaacaggaaaatcggcgcagagtatagcagcgggatcggattatgtctctcgtttatgataatatgcccgaatattcttcagacactgaatccagacatttaaaaattatgctgcaaaacattcgaatcgtgctggtcgaaacatcgcacaccggcaacatgggctctgtggcccgcgctatgaaaaccatgggcttaacgaacctgtggctggtgaatccgctggtgaaaccagactctcaggctattgctctggcggccggcgccagcgacgtgatcgggaatgcgcagatcgtggacactctggatgaagccctggccggttgcagcctggtggtggggaccagcgcgcgctcccgtacgctgccctggccgatgctggacccgcgcgaatgcggcctgaaaagcatctcagaagcggaacaggcgccggttgcgctggtgtttggccgtgaacgtgttggcctgaccaacgaggaattacagaagtgccactatcacgtggcgattgccgccaatccggaatacagctcgctgaatctggcgatggcggtgcaggtgatcgcctacgaagtgcgcatggcatggctggcaacgcaggagaaaccggtggaacctaaagaagagacggcctacccgctggtggatgacctcgagcgcttctacggtcatctggagcagacgctgctctcaaccggctttatccgagaaggccacccgggccaggtgatgaacaagctgcgccgtatgttcacccgcgcgcgcccggaaagccaggagctgaacatcctgcgcgggattctggcgtcgattgagcagaagaataaagagtagagctgatttccccctctccccgtgggagagggctggggtgagggcatcaggccgcacctatattatgaaggcacagaaggttaaatacctgactaaaacagtcaagtaaatagttgaccaatttagtcaggaatgtcagacttggccctgctatgcaatacccccattttacaataaaaaaccccgggcaggggcgagtttgaggttaagtaagacatgagactgacatctaaagggcgttatgccgtgaccgcgatgctggacgttgcgctcaactccgaagcgggcccggttccgttggctgatatttctgaacgacaagggatttccctctcttacctggaacagctgttctccagactgcgtaaaaatggactggtgtccagcgttcgtggcccgggcggcggttatctgctgggtaaagacgcaggcagtattgcggttggcgaagtgattagcgcggttgacgaatccgtcgacgcgacccgttgccagggtaaaggcggctgtcagggcggcgataaatgcctgacccacgcgctgtggcgcgatctgagtgaccgtctgaccggcttcctgaacaacatcaccctgggtgaactggtgaataaccaggaagttctggacgtgtcgggtcgtcagcaaagccatgaatcacagcgcagcacccgttcgcaggacgcaatcgacgttaaactgcgcgcgtaataaaaagataagtatttcagaatcaggccggggcgttagctcgccccgtgtactcggtcgtacatccagccggttgcctgattccttgcattgaagcgatgtacggagtttatagagcaatgaaattaccgatttatctcgattactccgcaaccacgccggtggacccgcgtgttgccgagaaaatgatgcagtgtctgaccctggacggaaactttggtaacccagcttcccgttctcaccgttttggctggcatgctgaagaggcggttgatatcgcccgtaatcagattgctgacctggttggtgccgatccgcgtgaaattgttttcacctccggtgcgaccgaatccgacaacctggcgatcaaaggtgcagccaacttttatcagaaaaaaggcaagcacatcattaccagcaaaaccgaacacaaagccgtgctggacacctgccgtcagctggagcgtgaagggttcgaagtaacttacctggcgccgcagagcaacgggatcatcgacctgaaagagctcgaagcggcgatgcgcgatgacaccattctggtttccatcatgcacgttaacaacgaaatcggcgttgttcaggacatcgcaaccatcggcgaaatgtgccgtgcgcgcggcatcatctaccacgtggatgcgacccagagcgtgggcaaactgcctatcgacctgagccagctgaaagtggacctgatgtccttctccggtcacaaaatttatggtccgaaaggtattggcgcgctgtacgttcgtcgtaagccacgtatccgcatcgaagcacagatgcacggcggcggtcacgagcgcggcatgcgttccggtacgctgcctgttcaccagatcgtgggcatgggcgaagcgtatcgcatcgcgaaagaagagatggaaaccgagatggcacgcctgcgtacgctgcgtaaccgtctgtgggacggcgtgaaagatatggaagaagtgtatctgaacggcgatctcgagcagggcgcaccaaacatcctcaacgtcagcttcaactatgttgaaggcgagtcgctgatcatggcgctgaaagacctggccgtttcttccggttctgcctgtacgtctgcaagcctggagccatcctacgtgctgcgtgcgctgggcatgactgacgagctggcacacagctctatccgtttctctttaggtcgttttactaccgaagaagagattgactacaccatcaaactggttcgtaactccattggccgtctgcgcgacctttctccactgtgggaaatgttcaagcagggcgtggatctgaacagcattgaatggtcacatcactaatcggtacataaggagaattcaatcatggcatacagcgaaaaagttatcgatcattacgagaacccgcgcaacgttggctcttttgacaacagcgatgaatctgtcggtagcggtatggttggcgcgccagcgtgtggcgacgtgatgaagttgcagattaaagtcaacaatgaaggtatcattgaagacgcgcgcttcaagacctacggctgcggttcagctatcgcgtccagctccctggtcaccgaatgggtgaagggcaagtctctggacgaagcacaggcaatcaagaacacggatattgctgaagaactcgaactgccgccggtgaaaattcactgctcaattctggcagaagacgcgatcaaagccgccattgcggattacaaaagcaaacgtgaagcaaaataattgaggtttgagtatgtcgattacccttagcgacagcgctgccgcgcgagtaagctcttttctggcgaaccgtggtaaaggctttggcctgcgactgggcgtacgtacctccggctgttctggtatggcttacgtactggagtttgttgacgaaccggcgtctgatgacaccgtgtttgaagacaagggcgtgaaggtggtggtcgatggcaaaagcctgcaattcctcaacggcactcagctggacttcgtaaaagaaggcctgaacgaagggttcaaattcacgaatccgaacgtcaaagacgagtgtggttgcggcgaaagcttccacgtttaaccgcgcgtcatccgaaaccccaccgtggctttgctacgcgtggggtttgttctaacaggctacccctgagattgttatggattacttcactctcttcggactacccgctcaatacccgatcgatctccaggcgctgacggtccgttttcaggatctccagcgtcagtaccatccggataaattcgccagcgggacgcaggcagagcagctggctgcggtgtcacactccgcaaccatcaaccaggcctggcaaacgctgcgtcatccgctggcgcgtgcagaatatctgctctcgctccacggtttcgatctggcgagcgaacagcataccgtgcgcgacaccgcctttctgatggaacagctggagctgcgcgaagagctggatgaaattgaacaggctaaagacgaagcgcgcctggaaagctttatcacgcgcgtaaagggcatgttcgatacccgccatcagcagatggtggagcaactgaacaacgagacctgggacgtggcggcagacactgtgcgcaaactccgttttctcgataaactgcgaagcagtgctgaacaactcgaagaaaagctgctcgatttttaatttcggaagcaattatggccttattacaaattagtgagccaggcttaagcgccgcaccgcaccagcgtcgtctggcggtcggtattgatctgggcaccaccaattctctcgtggcgaccgtgcgtagcggccaggcggaaacgctggctgacgagcagggccgccatctgctgccttccgtggtccactaccagcagcagggtcacgcggtcgggtttgatgcccgcgctaatgccgcacgcgatccggccaacaccatcagctcggttaagcgcatgatgggccgctcgctggctgatatccagacccgttacccgcatctgccgtatcagctacaggccagcgaaaacggcctgccgatgatcgcgacgtctgccggtctgctgaacccgattcgcgtttccgctgacatcctcaaagcgctggcggcgcgcgccacggcgacgcttggcggcgatctggacggcgtggtaatcaccgttccggcctacttcgacgatgcacagcgtcagggcaccaaagacgccgcgcgtctggcgggcctgcatgtgctgcgtctgctgaacgaaccgacggcggcggccattgcctacggcctcgattccggtcaggaaggggtgattgcggtttacgatctcggcggcgggacgtttgatatctcaatcctgcgcctgagccgcggcgtgttcgaagtgctggcgaccggcggggattccgcgctcggcggcgatgacttcgaccatctgctggcagactacatccgcgagcaggcgggcataagcgatcgcagcgatgcgcgcgtacagcgtgaactgctggatgcggccatcgacgccaaaatcgccctgagcgacgcgcagtcggtcacggttaacgttgcgggctggcagggtgagatcacccgcaatcagttcagcgaactgattgcgcctctggttaagcgtaccctgctggcctgccgtcgcgcattgaaagatgcgggcgtggaggccagcgaggtgctggaagtggtcatggttggcggctcaacccgcgtgccgctggtgcgcgagcgcgtgggcgaattctttggccgcacgccgctgacctctatcgacccggacaaagtagttgccgtgggcgccgctatccaggccgatatcctggtcggcaacaagccggacagcgaaatgctgctgctggacgtcatcccgctgtctctgggtttagaaaccatgggcggcctggtggagaaagtcattccgcgtaacaccaccattccggtggcgcgcgcgcaggagtttactaccttcaaagacggccagaccgcgatgtccatccacgtgatgcagggcgagcgcgagctggtgcaggactgccgctctctggcgcgctttgcgctgcgcggaattccggcgctgccggcgggcggggcgcacattcgcgttaccttccaggtggatgcggacggcctgctgagcgtcacggcgatggaaaaatcgaccggcgtggaatcgtccatccaggtgaagccgtcctacggcctgaccgatggcgaaattgcctccatgattcaggactcaatgagctacgccgagcaggatgtgaaggcgcgtatgctggctgaacaaaaagtggaagccgcacgcgtgctggaaagcctgaacggcgcgctcgctgccgatgccgcgctgttaagcgccgctgagcgtcaggtgattgacgatgctgccgcgcgcttgagcgcagtggccgaaggcaatgacgctgacgcaatagaagaagccattaaaaacgttgataaacaaacccaggacttcgctgctcgccgcatggacaaatctgtccgcgtcgcgctgaaaggccagtccgtggacgaggtttaatatgccaaagattgtaattttgcctcatgcggacctctgtccggatggcgctgttctggaagcgaagaccggtgaaaccattctcgatgtagccctgcgtgcaggtatcgaagtggaacacgcctgtgaaaaatcctgtgcctgcacaacgtgccactgcatcgtgcgtgaaggtttcgactcgcttgcagagagcaccgaagacgaagacgacatgctggacaaagcatggggtctggagcccgacagccgcttaagctgccaggccgcggtgaccgatgaagatctggtcgtagagttcccacgttacaccatcaaccacgcacgcgagcattgatatgggactgaagtggacagacagccgtgaaatcggcgaggcgctctacgacgcgaacccggatctcgatccgaagaccgtacgattcaccgatatgcatcagtggatttgcgatctggaagattttgacgacgatccaaacgcatccaatgaaaaaattctggaggcgattctgttagtctggttagatgaagcagaatagataacataaacgggctgccttcaggcggcccgtttgctagttgctaataaggataaataaaatgaccgaagcgatgaagattacgctctccacgcagccagccgactcacgctggggcgaaaaagccacctacagcatcaacaacgacggtattaccctgcacctgacgggcaatgatgatttgggcctgatccagcgcgccgcgcgtaaaattgacggccttggcattaagcatgtgtcgctggaaggcgaaggctgggacaccgaccgcagctgggcgttctgggcaggctacaaagggccgaaaggcacccgcaaaatcgagtgggcgaacctcgacgaagccggtcagaaagagctggaaagccgcctgcaaatcatcgactgggtgcgcgacaccatcaacgccccggcggaagagttaggccctgaacagcttgcgcagcgcgccgttgacctgctgtgcggcgtggcgggcgaaaagatgtcctaccgcatcaccaaaggtgaagatctgcgcgagcagaactacatgggcatccacaccgtgggccgtggttctgagcgtcctccggtcctgctggcgctggattacaacccaaccggcgataaagaagcgccggtctttgcctgtctggtcggaaaaggcatcactttcgacaccggcggctacagcctgaagcagagcgcgttcatggattccatgaagtccgacatgggcggtgcggccaccattaccggcgcgctggcgttcgccatcacccgtggcctgaacaagcgcgtgaagctctacctgtgctgcgcggacaacatggtgagcggcaacgccttcaagctgggcgacatcattcgctaccgcaacggtaaaaacgttgaggtgatgaacaccgacgccgaaggccgtctggtgctggccgatggcctgatcgacgcctctgcgcagaagccggagctgattatcgacatggcaaccctgaccggcgcggcgaaaacggcgctgggtaacgactatcacgccctgttcagcttcgacgacaagctggccgctcgcctgctggccagcgcggcggcggaannnnnnnnnnnnnnnnnnnnnnnnnnnnnnnnnnnnnnnnnnnnnnnnnnnnnnnnnnnnnnnnnnnnnnnnnnnnnnnnnnnnnnnnnnnnnnnnnnnnnnnnnnnnnnnnnnnnnnnnnnnnnnnnnnnnnnnnnnnnnnnnnnnnnnnnnnnnnnnnnnnnnnnnnnnnnnnnnnnnnnnnnnnnnnnnnnnnnnnnnnnnnnnnnnnnnnnnnnnnnnnnnnnnnnnnnnnnnnnnnnnnnnnnnnnnnnnnnnnnnnnnnnnnnnnnnnnnnnnnnnnnnnnnnnnnnnnnnnnnnnnnnnnnnnnnnnnnnnnnnnnnnnnnnnnnnnnnnnnnnnnnnnnnnnnnnnnnnnnnnnnnnnnnnnnnnnnnnnnnnnnnnnnnnnnnnnnnnnnnnnnnnnnnnnnnnnnnnnnnnnnnnnnnnnnnnnnnnnnnnnnnnnnnnnnnnnnnnnnnnntggcgtctgccgctggccgagttccaccgcagccagctgccgtccaacttcgccgagctgaacaacaccgcgagcgcggcgtacccggcgggggcaagcaccgcagcaggcttcctgtctcacttcgttgagaactaccatgaaggctggctgcacattgactgctccgcaacctaccgtaaagcggcggttgagcagtggtctgcgggtgcgaccggtctgggcgtgcgtaccgtggcgaacctgctgacggctgagtgatcttttttgccgggtagcgctacgcttacgcgcgccttcggagtcatcgtattgcccggcggcgctgcgcttgcacgggcctacggttttgtaggccgggtcagcaaagcgccacccggcgttttttgaagtagccaaactatgtcagaaaccaaaaacgaattagaaaccctgctggagcaggcggcgatcgaacccgcccaccgtccggcctttttccgcacgctgctggaatccaccgtctgggtgccgggcaccgcggcggaaggggagcaggttgtcgaagacagcgcgctggatctgctgcactgggagaaagacgacggcacctcggtgatcccgttctttacttcgctcgaggccttgcaggaagcggtagaagacgaacaggcgttcgtggtgatgccggtgcgcacgttgttcgaaatgaccctggggcagacgctgttcctcaacgccaaactgccgaccgggaaagagtttactccgcgcgaaatcagccacctgattggtgacgagggcaacccgctcagcactcaggaggtgctggaagggggcgaaacgctgctgctgtctgaagtggccgagccgcccgcgcagatgattgactccctgaccacgctgtttaaaaccatcaagccggtaaaacgcgcgtttctctgctccatcaaagagagcgctgacgaaaagcctgttctgctgatagggattgaggccgacggcgatatcgacgagatcatccaggcagcgggaagcgtggcaaccgacaccctgccgggcgatgagccgattgatatctgtcaggtgaagaaaggtgagaaggggatcagccactttattaccgagcacatcaccccgttctacgagcgtcgctggggcggcttcctgcgcgatctcaagaccaaccgcattatctgattacggcggggtgaccttcaccccgttgcttccagcagcagtaaatccatcagcagcaccagattcgactcaaacgacgttacccctgcggcttcggcggcgaaatgtaccgcttcgtcatagagggcaaaatgcacgtccgccatgcctgccagcgtattggccgacgcgcgggtaaaggcgacgatcgtcatgccgacgtttttggcgatccgcgctttatccagtacctgctccgtttcgccgctgcgtgaaacggcaataaacacctgatagcgcgcggcgttgctgagaaaaatattccggctgtctcccggcccggagatgaacgccgtttttcccagcacctgcaacttcttggtcaggtactcggcaaaaaggtacgaaaacccggcgccgtagagaaagaagctctctttctggcgcagcaggctggcaaactgctggcgtttgtcctgagtgacccactggaaggtctgctgatagttggcaacgaaccgggtaaaaagcgcgggcatttccgcatgttgctcaggctgtacggtgatatgcggcgtgtcagaaagcagctgcttgcagtgccagataaactcgctaaagccgctaaaccccagcttctgacacagccgcataatcgtcgcggtagagacaaatgtcgcctgcgccagctcgcgcaccgtgatgttgcccaccagcaatggatgctcagtgaggtgggcgaggacgcgatactccgcgcgggtcagcgacgatccgcgcgttaacagcgttgccaggcggttatccattatttcgccggttcaaccggcagatcgtcccgtgcaccccattcactccaggcgccgtcatacagagtcacgtcattcgcgccaagggttgccagcgccaggatcaccacgcaggccgtcacgccggagccgcagctggcaataaccggacgatgcaaatccacgccctgacgttcaaaaatggcacgcaattcatcggtggttttcagctcgccttcaaacaccagatcgccccacggtacgttcagcgcccccgggatatgtccgcgtttcagtcccggacgcggctcgtccgcttctgcgttgaaacgtggagcgggacgcgcatcgacgatttgcgccgtgttttcgtggctcacgaccagcacgtcggtcaggcgcttgaccacgttagcgtcaaacgtggcatcaaattccccttccggcagcgtgacgtcaccctgctgaagcggtagttcgtcgcgcttccagcctgcaagtccgcccgccagaatcgataccttttccacgccgaagtttttcagcatccaccacgctcgcggcgcggaaaacagattaccttcatcgtaaacaacaagatgtttatctttgctgatgcccagctcgcgcatcgccacggaaaacgcttccgggcgaggcagcatgtgcggcaggggagaggtgtgatcggagagggcttcgatatcaaaaaataccgcgccaggcaggtgccctgcacggtattcagcgggaacgtcacgatgctcctggcccggaggggccatgcgcgcgtcgataatctgaacttccgggtcgtcgccgtgctcaatcagccagtcggcagcgacaaaatatgaggtggacatggttgcctccattcttttccgtaaaaaaggattgtcggtgttttttctgacaccgacaagctaaccacgttcaactcgcgagcaatcccctattttttcaccgcttcaccgtccagccaggccttttgcagcgcaggccagtagtcgcggttggcttcgatcatctcatccagaatcgctttcgcgtgctccatggtcggcacggtgcggttcagagtgaacgcctgcaacgctttctcgtagctgccttcgatggttgcctcaaccagcagctgttcagaggccagttgctgttgcaggagcgtctggtggaacagcggtacctgacccacgcggacaggctccggcccttcggaggtgatataggcaggcacttccaccaccgcatcgtacggcaggttggtaatcgccccgcggttttccaccatcaccagatggcgttggcgcaggttgaacgccagtgagcaggcgacatcgacgataaattcgccgtgaacacctacgtggaaggcgtccggtaaaattccggtgcgctggtactcttcggcggcggcaaacagctttttctcacgcccgttcatcacttcgttggcgcgggtatagtccgggttctgatgctccacaatctggtttggcatcaggtagtactgtagatacgggttcggcaggtactccgggaagttatccataatcggcttgatgttgcgccaggttttcacccacgacggatccgagtgctgcgggtcggttttcgcggcatcttccgtcagcaggccaaacttcgcgatatgtttacgcagctccggcagcttgtcctcgccgtccacccgcacgcgggtaaaccagccgaagtggttgaggccaaaatagtccacctccagtttatgacgatccacgcccagaatggcgcccatattgcgcatcgcggccaccggcatatcgcagatattcagcacgcgtgcgttggggcgcaggcgacgcacgccctcagcgacaatcgccgccgggttggagtagttcacgatccacgccttttcgtgcgcgtagcgttccacccgatcgatcagctctaccatcggcaggatagtacgcaggccatatgccagcccgccgggtccgcaggtttcctggccgaccaccccgtggcgcagcgggatcttttcatcctgctcgcgcattttgtactgtccgacgcgcatctgggcaaaaacaaaatgcgcgccgctgaaggccacttccggatcgctggtgacggtgaatttgatgctctggctgtggtcgcgaataaccttctccaccacgggcgcaatggtgttctggcgcgcctcgtcaatgtcatacaggcggatctctgccagagggaaatcgtgcagacgtaccatcaggcttttcacaatacctggcgtgtaggtgctaccgccgccggcaatcgacagaataaatgggggtgtaaacatctttagctcctttcagagaaacgtctcaacggcttctcgcatttttttgacatgcagcccgtagaccacctgaacgttgttaccttgtttgataatccctttcgcgccggtcgctttcaggcgcggttcgtcgatgatggcgacgtccttcaccgtgacgcgtaagcgggtgtagcagttatctaccacctctatgttttcccgaccgcccagacccaccacgatggattcgcccagcccgtcgttattgcccttcgcctggtactcctgcttgctgtaaaggcgtgtctcctggtcctcatcttcacgccccggcgttttcatgttgaagcgcaggatcaggaagcggaataccacgaaataaagggcgaacatgatcagcccgaccatgatgtacatgggccagttggacttctccgtgccgagcggcaggttgtagaggatgaaatcgataatcccgttggcgccgatggcgtgaacgccaaacagcgagaacagcatcatgccgatgccggtcagcaccgcatgcaccacgaacagcagcggggcgacgaacaggaaggagaattcaatcggctcggttacgccgaccagcagcgaggtcagcgccgccgggatcagaatcgctttcgcaatcgctttacgctctggcttcgcggtcatgtacatcgccagcgccagagcgcttattccatgctgtgcgtacggccagagttcgctcatgaccacgccgagcagcatagagacaggcagcatcacaatcgcgacaaagcagtggccggagtaaatcgccatcgcgccgttaaactggacaccggaatatttgttgtacagataaccggagagcgccccggtcaggatcccggcgaaaacgcccatctccagcacctggacgcccagcaccatgctttgtccggcggctttcatctgttccgcaggggccagttctccctgaagctgtaacgtcacgttcatcgcgttaatgaatacgataaaggtcaccagcccaatcaacgccgcgtagcctttgtctcgtgttgccagtccaatggggatcccgacggcaaacaccagcgccaggttgaccagcaccgacacggcagatttggcgatcagctggccgacactctggatcagcgggtggccgagaaacggcaggtactcggccagattgccgttacccagcacattcccgaaggcgataaacaggccgacgatgggtaagataagtacaggtccgtacaatgattttccgaaattttgtagggcgttcacggctcgtttcatggctttctctcttattgaaccgcgcactcggggtgcgtcatggtcataaaactagcaggcctgatgcgagcttatccagctatcttcttgttttaaaaacaaatgacgcgaaaggtaacatgttacgttatgcgctgtgatcgacgttccatcacggtgtggctgcgtgatgccattctgcgaggtgctttccagattataaaattggactttttgtattaacgaaacttgcggataatacttatccggacgatgaccaacaggcccctcaggccagggacacaggatgaaaccgtttcgcttagctgcgatctctctcgcgctgctcaccacctttacgcttgtcggctgtgataacagcgacgacaaacctcaggccgctgcccccgcagcgtctactgcatcagaacagaaaaccccggcaaaaccggatcctgaaaagctggctaagctggccgcgcagagtcagggcaaggcgttgacgctgctggatgcctctgaagtgcaactcgacggcgctgcgacgctggttctgaccttctctgtaccgctggatcccagccaggattttgcgaaaacggtgcatgtggtggataaaaaaagcggcaaagtggacggcgcctgggaactggcccccaatctgaaagagctgcgcctgcgccatctggagccgaatcgtaatctggtcgtcaccgtcgaacgtaatttgctggcgctgaacaaagcgacattcggcatcgactatgaaaaagcgatcaccacccgggatgttgaaccgacggtcggattcgccagccgcggatcgctgctgccgggtaaggtggtggaaggattgccggtgatggcgctcaacgtcaacaatgtggatgtgaacttctatcgcgtgaagccggagtcgctggcctcgtttgtcagccagtgggagtaccgtaactcgctgaccaactgggaatctgacaacctgctgaagatggcggaactggtctacaccggccgtttcgacctcaacccggcgcgcaatacgcgtgaaaaactgctcctgccgctcaaagatattaagccgctccagcagtctggcgtctatatcgccgtgatgaatcaggctggtcactataactacagtaacgccgcgacgctctttaccttaagtgatattgggctgtccgctcaccgttatcataaccgcctggacatcttcacccagagtcttgaaaacggtgcggcgcagtcaggcgtgaccattacccttctgaacgataaagggcagaccctggccgaggcgaacagcgacgccgatggtcatgcgaaactggaaaccgataaagaagccgcgctgatcctggccagtaaagatggccagaccacgcttcttgacctcaaacttccggcgctggatctggcggagtttgatatcgccggtaacccgggttacagcaaacagttctttatgtttggcccgcgcgatctctatcgtccgggtgaaacggtgatcctgaacggcctgcttcgcgacagcgatggcaaaccgcttcccgatcagccggtaaaacttgacgtgctgcgtccggacggacaggtggcgcgtacggtcgttgtgcaacctgagaacggtctttatcgcttcaactatccgcttgatagcggcgcccagaccggcatgtggcatattcgcgcgaatacgggcgataaccagcagcgtatgtgggatttccacgtcgaagattttatgcctgagcgtatggcgctgaatctgaccgggcaaaaaacgccggtttctccgcaggaggatgtggactttaacgttgtgggctattacctgtatggcgcgccagctaacggcaattctctgcaaggccagcttttcctgcgtccgctacgtgacgcggtgcctgcgctgcctggcttccagttcggtgatattgccgaggagaacctgagccgtagtctggatgaagtgcagcttacgctggacgaacaggggcgtgggcaggttaccaccgaaagccagtggaaagaggcgcactcgccgctgcaactgattttgcaggccagcctgctggaatcaggtgggcgtccggtaacgcgacgcgccgagcaggctatctggcctgcggctgaacttccggggatccgcccacagttcgccagcaaggccgtttacgactaccgtaccgataccaccgtcaatcagccgattgtcgatgaaaacggcaacgccagctttgacatcgtctatgccgatgccagcgggacgaaaaaagcggtatctggtttgcaggtgcgtctgatccgtgagcgtcgcgactacttctggaactggtccgagagtgagggctggcagtctcagtttgatcaaaaagatctggttgagggcgagcaggagctaaacctcaaggccgatgaaaccggtaaagtcaccttcccggtggagtggggctcataccgtctggaagtgaaagcccctgatgacatggtcagcagcgtgcgcttctgggcggggtacagctggcaggataacagcgatggcacgggcgctgctcgcccggatcgtgtgacgctgaaactggacaagccatcctatcagccaggcgataccatcaacctgcatattgcagcgccggccgcaggcaagggctatgcaatgatcgaatccagcgaaggacctctgtggtggaaagagatcgacgtgccagcaaacggtctggatctcgccattccggtggataaggactggaaacgtcacgatctctatctcagcacgctggtggttcgtcctggcgataaatccaaatccgccacgccaaaacgggcggttggcctgctgcatctgccaatgggggacgaaaatcgtcgcctgaacatcgcactggataacccgcaaaaaatgcgtccgaaccagacgctttctgtgaaagtgaaagccagcgtaaaagagggggctgtgccacagaaggtgaacgtgctggtctcggctgtcgatagcggcgtgctgaacattaccgactacgtcacgccagatccgtgggaagctttcttcggtcagaagcgctatggcgcggacatctatgatgtttacggccaggtgattgaaggtcagggacgtctggccgcactgcgctttggcggagacggcgatgaactgaaacgcggcggtaagccaccggtgaaccatgtcaccataattgcacagcaggcgcagccggttacgcttgatgccaacggcgaaggcaccatcacgctgccgattggcgatttcaacggcgaactgcgtctgatggcgcaggcctggacggaagacgatttcggcagcagcgaaagcaaaatcattgtggcggctccgattatcaccgagcttaacacgccgcgattcctcgccagtggcgatacctcccgcctgacgctggacctgactaacctgacggaccagccgcaaacgctgaacattgcgttaaccgcaaccggtaagttgtcgctcgaaggcgctcagccagagccggttaagctgccgcctggcgcacgtagcaccctgtttattccggtgcgcgccctggaaggctatggtgatggtgaagtgactgctcaggtgtcggggcttcagctccctggtgagacgtttgcgccgcagcagaagagctggaaaattggcgtgcgtcccgcattcccggcgcaaacggtgaatacgggcacgatgctgaaccctggcgaatcctggagtgcaccagcacagcatatcaacggtttctcgcctgccacgctacaggggcagctgttgctcagcggtaaaccacctttaaatctggcgcgctacattcgtgaacttcaggcctatccatacggatgtcttgagcagaccaccagcggcctgttcccgtcgctttacaccaacgcggcacaacttaaggcactgggtattaaaggcgataccgacgataaacgccgtgcggccattgatatcgggatctcccgtctgctgcaaatgcagcgtgacgatggcggttttgccttgtgggataaaaacggcccggaagagtactggctgaccgcctatgtcacggacttcctggtgcgggcaggggagcagggttacagcgtgcctgccgaggcagtgaataacgccaacagccgactgctgcgctatttacaggatccggggatgatgtccatccgctacagcgacgacacccaggccagcaaatttgctgttcaggcgtacgcttcgctggtgctggctcgtcagcaaaaagcgccgctcggtgcgctgcgtgaaatctgggagcgccacgctcaggctgcttccgggcttccgttgatgcagctgggcatggcactcaaactgatgggggatgcaccgcgcagccagcaggcgctggatctggctctcaaaactccccgtaacgacagccgaaactggatggcggattacggcagccagctgcgtgataatgccctgatgctctccctgctggaagagtacaagctgctgccggatgcgcaaaacaggctgctgaacgcgttatctgaagacgcgttcagccagcgctggctgtctacccaggagagcaatgcgctgttcatggccggacgttcactgcaaaccttgtcaggcgcgtggacggcaacgaccagcctctctgaacagacccagagcagtgataaagcgcaggtagaaaacctgaacggcgaccagcttgatgccttgcaggtgacgaatatcggcactacgccgctgtgggtacgactggacacgactggctatccggagtacgcgcctcagccatcctctaatgtcttgcagattgaacgtcatatcctggcgacagacggcagcagcaagtcgctctcttctctgaagagcggtgagctggttctggtgtggctggaggtgaaggccagccagaacgtgccggatgcgctggtggtggatctgctcccggcaggtatggagctggaaaaccagaatctggcgagcagcagcgccagcttgcaggacagcggcagtgaagtgcaaaacctgctgaatcagatgcaacagtctgatattcagcacatggaattccgcgacgatcgctttgtggccgcggtgccggtcaatgaaggtcagccggtcacgctggtttacctggcccgtgccgttacgccgggaacctaccaggtgcctgttccgatggtcgagtccatgtatgttccgcagtggcgggcaacgggggcggccagtggcccgctgatcgttgttccgtaagatgcggatagcacgcctgattcgctcccgctggctgtggctggcgggagcgcttctcgtttcaggggggctgattgtcgtcgctgaccgcgtgtggccgttgcccctgaaagaggtcaacccagcgcgagtggtggtggatgagcagggtgttccgctgtggcgttttgccgacagcgaaggcatctggcgctatccggttaccattgaagaggtttccccacgctatcttgaggcgctgatccagtatgaagatcgctggttctgggatcacccgggcgtcaatccgctttctgtactgcgtgccgcctggcaggatctcacctccgggagagtggtttccggcgggagcacgcttaccatgcaggtggcgcgcctgctggatccgcatccgcgtacctttggcggtaaaattcgtcagctgtggcgggcgatgcagctggagtggcatctctccaagcgtgaaatcctgacgctgtatcttaaccgtgccccgtttggcggcacgttgcagggcgtgggcgcggcaagctggacttaccttggcaaaccgccgtctcagctgagctattccgacgcggcgctgctggcagtgctgccgcaggcacccagccgtctgcgcccggaccgctggccggaacgtgccgaagcggcgcggaacaaagtgctcgaccgtatgctgactcagggtgtctggtctgagaagcaggtgaaagagtcccgtgaagagccggtctggctggctccccggcagatgccgcagctggcaccgctcttttcccgcatgatgctgagtaaaagtcgtgacacaaaaatagtcaccacgctggatgcagctttgcaacgacagcttgaagagctggcaatgaactggaaatcacgcctgcccgcccgtagttcgctggcgatgatcgtcgtggatcatacatccatgaaagtgcgtggctgggtaggctcggtagatatcaatgatgacagccgtttcagccacgtggatatggtcaatgcgatccgatcgccgggatcggtcctcaagccattcatctatggcatggcgctggacgatggtctgatccatcccgcttcgttattgcaggatgtgccaagaaaaacgggggattatcgtccgggcaactttgacagcggcttccatgggccggtcagtatgagcgaagccctggtgcgttccctcaacctgcctgcggtgcaggttctggaagcgtacggcccaaaacgttttgccggaatgctgagcaacgcgggattaccgctcattctgcctgcgggggcacagcccaacctctctctgatcctggggggcgcaggcgcacgcctggctgatatcgctgccgcctatagcgcctttgcgcgtcagggtaaggcgggccggctgcgtttacagccgggcgatccgctgatcgaacgtccgctgttatcgcagggggcggcgtggatcattcgacgcattctcgctaatgaagcacagcccctgccggacagtgcgttgccccaggttgcgccgctggcgtggaaaacgggcaccagctatggctaccgggatgcctgggccatcgggctgaacgcccggtatgtcattggaatctggaccggacgcccggacggcacgcccgttgccgggcagtttggtttcgccagcgcggtaccgctcctgaatcaggtcaataacatgcttcagtcccgctcgatggtggatgaagcgcgcctgccgcgcgatccgcgtcctgcaagcgtaggacggggcgtgatttgctggccggggggccagtccctgcctgaagggagcgaaaactgtcggcgtcggctgtcaacctggctgctggaaggcagtgaaccgcctacgctgttgctgccggaacaggaaggtattcgcgggatccgtttcccggtctggctggataaagaaggcaaacgcgttgcggcggattgtcctgatgcgacagagaaagtgctggatgtctggccgctaccgctggagccctggctgcctgctgctgaaaaacgggctgctcgtcttcccgcccgttcagctagttgccctccgctggataaccataatgcggcgccgatgatgttgtcaggcgtcagagaaggggcggtaattaaacgtcttccgggtgaaaaaaatatgaccctcaacgtttcaaccagcggcggggagggacaacgatggtggtttttgaatggcgaaccgctggacgggcatcagaagaattattcactgcaattatatttaccgggtaaatatcaattaattgtattggatgaaacaggacaaacggcgacggtgaattttgaattagatcgctaagtgttactcctcaagagttagcttgataattatcaatattcgttcctgaaaaaaaacgagaatgcgtttttatttgaaggaacgagcaatgaaaaaaaataaacatcagggagaagggcttattcccgccatatcccggcgtcagtttattcaggcagggtcggcgctcgccgccctgccgtttgtcgtcaaaaccggcaaagtacaggcacagggcgcggcggtttcagacgctacgcctgaagaaaaagtggtgcaaacctgtagtacgtttgactgcggcgggaagtgtgatattcgtgctcacgtcagtgatggcgttgtgacccgaatttcaacgcgtccggataacgcgctggatccgcagatgccagtaatgcgcgcctgcgttcgtggtcgggcttatcggaaatttgtttatcaccccgatcgactgaaatatccaatgaaacgcgtaggtaaacgtggcgaaggaaaattcgagcgtattacctgggatgaagccaccaccctcattgcgaatcaattaaaaactattacgcaaaaatacggtgctgcgtcacgctatgttcatgtgggcaccgcagtgtccggcgggaccttttccggcgataaaatggttcgtcgtctgctcaacttaaccggcggctatctcgaaagctatcactcggtcagtatgggtaacacggcggcggcaacaccgtatacctatggcaccgccgccagcggcagctctctggacacgctgctggacaccaaactggtcattctctgggggcataacccgacggaaaccatctttgggcacagcaaccacttctaccagaagatgaagcaaaacggcacgcgcttcattgttgtcgacccacgctattccgacacggtttcctcccttgccgatcagtggatcccgctgcttcccacaacagacaacgccctgatggacgcgatgatgtatgtgatcgtcacggagaatctgcacgatcgcgactttattcagcgctacaccctgggctttgacgaagacgctatgccagagggcgttccggccaatgaatccctgatggcttacctgagcggtgcaaaggatggcgtggcgaaaacgcctgagtgggcagagaaaatcacccacgtgcctgcacaaactattcgtcagctggcgcgtgactacgcaaccaccaaacccgccgcgctgatccagggctggggaccgcagcgtcacaactgcggcgagcgcaccgcgcgcggctcgacgatactggccacgctaacgggtaacgtcggggtgaaaggcggctgggcagcaggctatggcggctgcgcaaaccgcaaatttgcggccgggccagagatgccggacaacccggtcaacgccaaaatttcggtcatgaactgggtccaggccgcggatgatgcttctaaggtaaccgcggaagatggcctgaaggatgctgagaagctggacagcaatatccgcatcctgttctcgctggcgggcaattatctggctaaccagaacccggatcttcatcaggcaacccgtgtcctggaagacgagtcgaaaatcgagtttatcgtcgcaagcgatctgtttatgacgccgagcgccagatacgccgacctgcttttgccggaaaccagcttcatggaacgctggaatatcggcgaaacctggggcacggcaagctatctgatcctgtcagaaaagctgattgaacctgaatttgaacgccgttcagactacgactggctacgggaggtcgctgctaagcttggcgtcgagccagcgttcagcgagggccgtgacgaaaaagcgtggattgagcacatctgggagcagacgcggctgtccatgccggatgaaaacctgccggacttcgcgacgctacagaagacgcgtcagcatcttttcaaaagcgcgccgtacgttgcctttgaagacaacattcgcgatccgcagaatcatccgttcccgacgccgtccggaaaaattgagatcttctcgaagcgtctgtacgacatgcagcacccggaaattccggcgctgtcgcactacgtgccagcccatgaagggccggaagacgagctggcgaaaaccttcccgctccagctgatcacctggaaagggaaaaaccgcgctaactccacccagtacgccaacccgtggttaattgaggcgcagcagcaaaagctgtggatcaacccgcaggatgcgcaaaagcgcggcattgcgcagggggataccgtgcgtattcataacgcgcgcggcatttgcgagatcccggcggaggtcacgccgcgcatcattccaggcgtggtggccatgcaggcaggcgcctggtggcagccggacgcgcagggtatcgataaaggcggctgcgcgaacgtgctcagttccgcccgtattaccgcgcttgcgaaagggaattcccatcaaaccatgctggtggaggtagctaaagcatgagtcagtttaaacattacgcaccggtgagcgacaaacagctgggtttttatatcgactcttctcgctgctcgggctgcaaggcatgtcaggtggcgtgcaaagataaaaacaaccttgaggtcggacgtcgtttccgtcgcgtttatgaagtcaacggcgggagttttatcccgaccgggcagggcggcgtcagcaacaacgtttttgcctacacgctctctatttcctgtaaccactgcgcagaccctgtctgcaccaaaaactgtccaaccaccgcgatgcataagcgtccgggggacggcattgtgcgcgttgatactgataagtgtgtcggctgcggctactgcgcatggtcttgcccttacggcgcgccacagctcaacgagcagactgggcagatgtccaaatgtgatttctgcgtagatctccaggcgaagggagagcagcccgtctgtgtggcaacctgtccactcgaagcgattaaattcgggccgattgatgaactgcgggcgaagtatggtgcggtctgtgatgtgaaaggcctgcctgattcctccatcaccaaaccaaacctggtgatcaaagcgcatcagggcgcagagaaagaggggaaacgtcatgcatgagttaccactgctgatttttacgttgttcctgcaaggatcggttggcgttacgctgtggctggcgttcggaagcacgcaacgcagcgcgctgctgccggcagccggagcgtttgtgctggcgagtctggggctgctcgcctccgcgctgcacatgggctatccgcttaatgctcttaacgcgctgcgccacgtatccagctcctggctgagccgtgagattatctttgccagtctttatcttgcggcgcttggcttcgcaacgctgctgatgtttgtcaaaaagccaggctggaagccactgttggttgtggcaggtctggttggtttagtcgacgtgttctgcatggcgcagatctacatgcacgcatccgtggtgacatggcagcacgtaaacacgctggtgctgtttttcggttcggtggggattatcggttcagcctgcatggccgttgggacgcgtactcagacaaccgtgcgtgcggcggttgtcattattacgctggtggtgcttgtgcgtctggtgatgcagcccgtctggctggcagatattacggctatggacaacaccgtggtgacgttccctcacgcaccgctacagatgctggagcaactgcgaaccgttcatctgctgagctggtgcgtatccgttgcgggtatgctgtgctttgctgcgggcggtctgaaagcggcgcgatctcccatgctgctgggaagcgcattgctgattgtcggtgagctgatgctgcgcttcgttttcttcagtattggctgatgggcggattgacctttgccccggcgatggacgtgacgcatgcgtgcgtccgtcgccgttttcgccacgcttcctgcctcgcctgcgcggacgtctgtcctgtgcaggctttttcttttaccgactcaagcgtctcggttgatgacagccgctgtattgaatgcggtgactgcctgttcgtctgccccgctgaggccatcaccggcatcacgccgcgaaaacgctttctgtgtggcgatacgcttgttgagccgtttactgaccgtgcgccaggggtgaatgagcttctgctgtggcacgcgcagtaccacgttcgttttatcagtatcgacgcggagcagaatcctgactggttgctggcgattgctcggctgaatctggcgcttcgccgacgcggtgaagcggcgtgggcgtttaaatatatacccgtcaacgaggttaataccgcccggcgtgcgctgatgcacgttccccgagaggatgtccaggcctgtagcgtcgtgcccggtcagcgtgaactgcgcagggcgttttctgcgtttagcgaggcagagataactctcgataccgaatcctgcgtactgtgcggcgcgtgctggcggagttgtacggaaaacgcgattcggtttgagaacgctgaactggtcgtggaaaccggacgctgtacggggtgcggcggctgcgaagcggtatgccagcatgcggcgataaacgtgacgcaaacagaaggaacagcgaaaagcgtgaccataccggcatatgaagccgtttgcctgacgtgccaccgtcatttctggtcatttacgtctgatgaaaagcagtgtccgctctgttttcatcatcaacacggtatgcgaaatacgagctgttgctaatcttcgtctcattttaaaaaaatgttatgcataaccataggcaatggcgctattgctctttataatccgcgccacaccatactcaggtatgcaaaaacaacagaacattttacagaggttatcaatggctattgaacgtactttttccatcatcaaaccaaacgcggtggacaaaaaacgttattggcagcatcttcgctcgctttgaatcagcagggtttaagatcgttggcaccaaaatgctgcacctgaccgttgagcaggctcgcggtttctacgctgagcacgaaggtcgcccattctttgacggtctggtcgagttcatgacttctggcccaatcgtggtatccgtactggaaggcgaaaacgcggtacagcgtcaccgcgatctgctgggtgcaaccaacccggacaacgcactggcaggtactctgcgcgccgattacgcagacagcttcaccgagaacggcacccacggttccgactctgttgaatctgctgcgcgcgaaatcgcgttcttcttcgctgaaggcgaagtgtgcccgcgcactcgctaataatttcgtaaatgccgcgtgcaaacgtggcatccctgcgccagactttgtacaatgcaacgccccggacgagcagactgcttaccggggcgtttcttttcaacccaccaagggccacaacgtgtaacaacgaggccggaaaaaattatgtctgaattagtgaatacctccgaagtcgccattcctgcggttcccaataaaaatggaaaaattaacctgctggacctgaaccgtcagcagatgcgcgagttctttaaagagatgggcgagaagccatttcgtgccgatcaggtcatgaaatggatgtaccactattgcagcgacaactttgatgacatgacggacatcaacaaagtgctgcgcaataagcttaaagaagtggcggaaatccgcgcaccggaagtggtggaagagcagcgctcttcagatggcaccatcaagtgggccattgccgttggcgatcagcgcgttgaaaccgtgtatatcccggaagacgatcgcgccacgctgtgcgtctcttctcaggtgggctgtgcgctggagtgcaaattctgctctacggcgcagcagggctttaaccgtaacctgcgcgtgtcggaaatcatcggccaggtctggcgtgccgcgaaaatcgtgggcgcggcgaaagtcaccggtacacgtccaatcaccaacgtggtgatgatggggatgggtgaaccgctgctcaacctgaccaacgtcgttccggcgatggaaatcatgctcgacgatttcggttttggtctgtccaagcgccgcgttacgctctctacttccggcgttgtgcctgcgctggacaaactgggcgacatgattgacgttgcgctggccatctcccttcacgcgccaaacgacgccatccgtgacgaaattgtgccgatcaacaaaaagtacaatatcgaaaccttcctggctggcgtacgccgttacctggagaaatccaatgccaaccagggccgcgtgaccattgaatacgtgatgctggatcatgttaacgacggtaccgaacatgcacatgagctggctgaactgctgaaagatacgccatgtaagatcaacctgatcccatggaacccgttcccgggcgcgccgtatggccgtagctcgaacagccgtatcgatcgcttctcaaaagtgctgatggagtatggtttcaccaccatcgttcgtaaaacgcgtggcgatgatatcgacgcagcctgtggtcagctggcgggtgacgttattgaccgtaccaaacgtacgctgcgtaagcgcatgcagggtgagtcaatcgcggtcaaaaccgtttgattattatgcatacacggcgcgttttttgcgccgtgaagcattaatttactgaatattcagtcacaatcattatgactgattaataattacggtgcgtttcatacgactttcgggcagtatgtaacgacgtaacaacagtttagcgtgaaggcctgccagcgctgtcatctgcggcccgacagtcttatactgtttgttccaggttaactgacctaaagtttcgcggtgcgggtggcattgtgactcaccggcacctgaacccttattttcacgtaccagtagttgtagcgaatgaatactgaagccactcacgatcaaaatgcagcactctccactggcgttcgtcttcgcaacgcccgtgaacaactcggactcagccagcaagccgttgcagaacgcctgtgcctgaaggtttccaccgttcgcgatattgaagaagataaggcacccgccgatctggcttcaacgtttctgcgcggttatatccgttcttacgccaaactggttcatatccctgaagacgaattactgccgatgatggagaagcaggcgcctgtgcgtgcggcaaaagttgcgccgatgcagagcttctctctgggtaaacgtcgtaaaaaacgcgatggctggctgatgagctttacctggctggtcctgttcgtggttgtcggcctgacgggcgcatggtggtggcaaaaccacaaagcgcagcaggaagagatcacgacgatggccgatcagtcctccgctgagctcaatcagtctggtaataacggcgcgcaaagcgtgccgctgagcaccgaaggagctgcgacctccagcgaacctcaggcggcagcaagcagcacgcttgcaaccgagccagcgacgacgccagaagcgacggcgaatactgcaccagccacccaggcccaggatcaaaacgcggtcgtatcaccttcacaggccaatgttgataccgcccctgcggcaacggcaccggcagataacaccgcggcgtcactgccaactgacccggcgggtacggcggcacctgccgttgacccgaatgcgctggtgatgaatttcacggcggattgctggctggaagtgactgatgcgacaggtaaaaagctgttcagcggcctgcaacgtaaagatggcacgttaaatctaacgggccaggcaccttacaagcttaaaatcggcgcaccggcagcggtacagatccagtatcaaggaaaacctgtcgatctgagccgctttatcagaactaaccaggttgcgcgtcttaccgttaatgccgaacaatcagcagcacagtaacagacgggcaatgcgggagattttacatgcataaccaggctcctattcaacgtagaaaatcgaaacggatttacgttgggaacgtgccagtcggcgatggggcgcctatcgccgtccagtcgatgaccaatacgcgtactacggatgtagaagcgacggtcaatcaaatcaaagcattagaacgcgtaggcgcggacattgttcgcgtctctgtaccgaccatggatgccgccgaggcgttcaaactgatcaagcagcaggtgagcgttccgctggttgccgatattcacttcgattaccgtatcgcgctgaaagtcgctgaatacggtgtcgattgcctgcgtattaacccaggcaacatcggcaacgaagagcgcattcgcatggtggttgactgcgcccgcgataaaaacattccaatccgtatcggcgtgaacgctggctctctggaaaaagatctccaggaaaagtacggtgagccgacgccgcaggcgctgctcgaatccgcaatgcgtcacgtcgatcatctggatcgccttaacttcgatcagtttaaagtgagcgtgaaagcgtctgacgtcttcctggccgttgaatcgtatcgtctgctggcaaaacagatcgatcagccgctccaccttgggatcaccgaggcgggcggtctgcgcagcggttcggtaaaatcggcgattggtctcggcctgctgctctctgaaggcatcggcgacacgttacgcgtctccctggccgccgatccggtggaagagatcaaagtcggtttcgacatcctgaaatcactgcgtatccgcgcgcgtgggatcaacttcattgcctgcccaacctgttcacgtcaggagtttgacgtgatcggcaccgtgaatgctctggagcagcgtctggaagacatcattaccccgatggacgtttccatcatcggctgcgtggtgaacggtccgggtgaagcgctggtgtccacgctgggcgttaccggcggtaacaagaaaagtggtctctatgaagatggcgttcgtaaagatcgtctggataatagtgatatgatcgaccagctcgaagcccggattcgcgcgaaagcgacgatgatggacgaagcgaagcgcatcagcgttcagcaggttgaaaaataacgtgatgggaagctggctgcttcccatgtatgattgaacccattctttgggttcttttttgtatatagaaagagaataaacgtggcaaaaaacattcaagccatccgcggcatgaacgattatctgcctggcgaaaccgccatctggcagcgcattgaaggcacactgaagcaggtgctcggcagctacggttacagcgaaattcgtttgccgattgtagagcagaccccgttattcaaacgcgcgatcggcgaagtaaccgacgtggttgaaaaagagatgtacacctttgaggatcgcaacggcgacagcctgaccctgcgtcctgaggggacggcgggttgcgtacgcgccggcatcgaacatggtctcctgtacaatcaggagcagcgcctgtggtatatcggcccgatgttccgccacgaacgtccgcaaaaaggccgctaccgtcagttcaaccagcttggcgtggaagtgtttggtctgcaaggaccagatatcgatgctgaactgattatgctgactgcccgctggtggcgtgcgctcggtatttctcagcacgtgtccctggagctgaactctatcggttctctggaagcgcgtgcgaactaccgcgatgcgctggtggcgttcctggaacagcacaaagagaagcttgacgaagactgtaagcgtcgtatgtacagcaacccgctgcgcgtactcgattccaaaaatcctgacgtacaggcgctgctgaacgatgcgccagcgctgggtgactacctggatgaggattcccgcgaacactttgctggcctgtgcaaactgcttgaagcggcgggcattgcttataccgttaaccagcgtctggtgcgcggtctggactactacaaccgcaccgtatttgagtgggtcaccaccagcctcggttcgcagggcaccgtctgtgccggcggtcgttatgacggtctggtcgaacaactgggtggtcgcgcagcaccggctgtaggcttcgcgatgggccttgagcgacttgttttgctggttcaggcagttaatccggaatttaaagccgatcctgttgtcgatatatacctggtggcctcaggtgcggatacgcagtctgcggcgatgcagcttgccgaacgcgtgcgcgatgcgctgccggacgttaagctgatgaccaaccacggcggcggcaactttaaaaaacagtttgctcgtgccgataagtggggcgcaagtatcgcactggtgctgggtgagtccgaagtggccaacggcgaagtggtggttaaagacctgcgctctggtgagcaaactacggtaacgcaggatggcgttgcggcgcacttgcgcactctattgggctaaggagaaggactgcgtggaaatttacgagaacgaacacgaccaggttgatgcggttaagcgcttctttgctgaaaacggcaaggcactggttgtaggggttattttaggtgttggtgcgctggtaggctggcgttactggaacaatcatcaggctgactctgctcgcggttcgtccctgaactacgaaaataccgttagcgcaatccgtgccgatcagccgcaaacgctgacggctgcggagaaatttgccgctgacaacaaaaacacctacggcgcgctggctgcgctggaagtggctcagcagtatgttgataaaaacgaactggacaaagccgctgcgcaactgtctcaggggcttgctgctgccagtgacgaaaatctgaaagcggtgatcaatctgcgtctggcgcgtatccaggttcagcagaaaaaagccgacgacgcgctgaaaacgcttgataccatcaaaggcgaaggctttgccgctattgttgccgatcttcgcggtgaagcactgctgagtaaaggtgataaagcgggcgcgcgtaaagcgtggcaagctggcgtggatagtaaagcttcacctgcgctgagcgaaatgatgcagatgaaaataaataatttgtccgtctgagagggacccaatgcaattgcgtaaattacttctgccaggactgctttctgttacgttattgagtggttgttcactgttcagtggcgaagaagacgttgttaaaatgtccccgctgccgacggttgaaaaccagttcaccccatccaccgcctgggacacctctgtgggagatggtattggcgatttttattccaacctgcacccggcatttgctgacggcgttgtctatgcggccgatcgcaaaggcaccgttaaagcgctgaacgctgatgacggaaaagaagtgtggtccattaacctggcggaaaaagacggctggttctcccgtaaacctgcactgctttctggcggcctgaccgttgctggcggtcacgtgtatgtgggcagcgaaaaagcgcaggtttacgcgctgaatgccagcgacggttcggttgcatggcagaccactgttgccggtgaatccttgtcgcgtccggttgtcagcgacggcctggtgttgatccataccagcaacggccagttgcaggcgctgaacgaagccgatggtctggtaaaatggacggttaacctggatatgccagcgctgtctctgcgtggtgaatctgctccggcgaccgcctttggcgccgccattgtgggcggtgacaacggccgtgtcagcgcggtactgatgcagcagggccagatgatctggcagcagcgtatttcccaggcgaccggttcaactgaaattgaccgtctgagtgacgtggacaccacgccagtcatcgttgacggtgtggtttacgcgctggcgtacaacggcaacctgacggcgctggacctgcgtagcggccagatcatgtggaaacgtgagctgggttccgtgaacgatttcatcgtcgacggcaaccgtatttatatggtggatcagaacgaccgtctgctggcgctgagcaccgaaggtggcgtgacgctgtggacgcagagcgatctgctgcaccgtctgctgaccgcaccggcactgtataacggcagcctggtggtgggcgacagcgaaggctatatgcactggatcgatccagagaatggtcgcttcgtggcacagcagaaagtggatagctcaggcttcctgacggagcccgttgtggctgacggcaaactgctgattcaggcaaaagacggcacgctgtacgcgatcacgcgttaattacacggcggttgtagtatactaaacggctcctgttcactcaggagccgttttgacatttttaaaaacgctgcgaaagcgacgttattttgaattttatgaggcttcaaacatggtacctgtggtcgcgcttgtcgggcgccctaacgttggaaaatccactctttttaaccgtttaacacgcacccgtgatgcgctggttgcggatttcccggggctgacgcgtgaccgtaagtacggtcgtgcagaggtggaaggacgcgagttcatctgtatcgataccgggggtattgacggtacggaagacggcgtagaaacccgcatggcagagcaatctctgctggctatcgaagaagcggatgtggttctgtttatggtggatgctcgcgctggcctgatgcccgcggattctgctatcgctaaacatctgcgttcacgcgaaaagccaaccttcctggtggcgaacaaaactgacggcatcgatgccgatcaggctgttgcggatttctggtctttaggcctgggcgatatttatcctatcgcggcctcgcatggtcgtggcgtcaccagcctgctggaaaccgttctgctgccgtgggtagatgaagtgaacccgccggaagaggtggacgaggacgctgaatactgggcgcagtttgaagccggagaggaaggcgaggaagagccggaagacgacttcaacccgcaggatctgcctatcaagctggctatcgtgggtcgcccaaacgtaggtaagtctacgcttactaaccgtattctcggtgaagagcgcgtggtggtttacgacatgccaggcacaacgcgtgacagcatttacattccaatgcagcgcgatgaacgtgagtacgtacttatcgacaccgcaggggttcgtaagcgtgggaaaatcaccgatgtggtagaaaaattctcggtgatcaaaacccttcaggcgattgaagacgccaacgtggtgctgctggtcatcgacgcacgtgaaggtatctccgatcaggatctctctctgctcggctttatcctcaatagtgggcgctcgctggttatcgtcgtcaacaagtgggacgggctgagcaatgaagtgcgcgagcaggtgaaagagacgctggacttccgtctgggctttatcgactttgtccgcnnnnnnnnnnnnnnnnnnnnnnnnnnnnnnnnnnnnnnnnnnnnnnnnnnnnnnnnnnnnnnnnnnnnnnnnnnnnnnnnnnnnnnnnnnnnnnnnnnnnnnnnnnnnnnnnnnnnnnnnnnnnnnnnnnnnnnnnnnnnnnnnnnnnnnnnnnnnnnnnnnnnnnnnnnnnnnnnnnnnnnnnnnnnnnnnnnnnnnnnnnnnnnnnnnnnnnnnnnnnnnnnnnnnnnnnnnnnnnnnnnnnnnnnnnnnnnnnnnnnnnnnnnnncacgggagtggtgttggcaacttgttcgaatccgttcgtgaagcctatgacagctctacccgccgtcagagcacggcgatgctgacccgtatcatgaacatggctgctgaagaccaccagccgccgctggtgcgcggtcgtcgcgtgaagctgaaatatgctcacgccggggggtataacccgcctatcgtggtgatccacggtaaccaggtgaaggatctgccggactcctacaaacgctacctgatgaactacttccgcaagtcgctggacgtgatgggtacgcctatccgtattcagttcaaggaaggggagaacccgtttgcgaataaacgcaacaccctgacgccgaaccagatgcgtaagcgtaagcgtttgattaagcacattaagaaaagcaaataattcttaccgaactcactaaaacccgcgcctgtcgcgggtttttttcgcccattcaaaaggcctgccttccctgtgtgatgtcaatcactattcgcttttaaccatgtttatatctaagaaagtagacaatcatcgaattttcgtcttaaagtccagggttcggtactagacaaaactagcgcctggttatcaaatggttaaccaacatttcgccgcatgtaaaaaatcgatcggatacgtaaccgttcggcgtacatgctggtgtttacaagcacgacacataccttttcgggagaattatgcaatcctctgttaatcaaaaagagagccgaaccttcttcggccatccttatccgctcggttcgctgttcttcaccgagatgtgggagcgtttttcgttttacggtattcgcccgctactgattctgtttatggccgccaccgtgtatgacggcggaatgggcctggcgcgtgaaaacgcctcggcgattgtcggcatctttgccggcaccatgtacctcgctgcgctgccgggcggctggctggcggataactggctcggccagcagcgggccgtctggtacggttcgattttgattgcgctcgggcacctgtcgatcgccctgtcggccatcatgggcgacaacctgttcttcatcggcctgatgtttatcgtgctcggctccggcctgttcaagacctgtatctcggtcatggtcggcaccctgtataaaaaaggcgatgcgcgtcgtgacggcggtttctcgctgttctatatgggcatcaacatgggctcgttcattgcccctctgatttccggctggctgattaaaacccacggctggcactggggctttggtatcggtggtatcgggatgctggtcgccctgattatcttccgcgtgtttgccgttccggccatgaagcgctacgacagtgaagtcggtctggactccacctggaacagtccggtagtgaaacgtaacggcgtgggtgcctggctgctggcgctggctgtgggtgttgcaatcatcgtaacgttgattgcccagggcgtgattgtgattaatccggtcgcggtcgccagcgtgctggtgtatgtgattgccgcctccgtcgcgctctacttcatctatctgttcatcttcgccgggctgaatcgcaaagagcgcgcaaggctgctggtgtgctttattctgctggtctccgccgcgttcttctggtccgcgttcgagcagaagccaacctccttcaacctgttcgccaacgactacactaaccgcatgatcggtgattttgagatcccggcggtgtggttccagtcgatcaatgccctgttcatcattctgctggccccggtatttagctgggcatggccgaagctggcgagcaaaaacattcgtccgagcagcatcaccaagttcgtgatcggcattctgtgcgcggcggcgggctttggcctgatgatgctggcggcgcagaacgtgctgagcaacggtggggcaggggtttctccgttctggctggtgggcagtatcctgatgctgaccctcggggaactgtgcctgagtccgattggtctggcgaccatgaccctgctggcgccggagagaatgcgcggccagatgatgggcctgtggttctgcgccagtgcgctgggtaacctggctgcggggctgattggtggtcacgtgaaggccgaccagctggatatgctgccagacctctttgcccgttgctccattgcgctgctgatttgtgctgcggtgctgatcgtcctcattgttccggtgcgccgcatgctggaaaatgcgcagactaaaccggccgctaacgcctgataaacctcgaccttgccggggtggcgttatgccccggcaattgacttaacgaggtaagaacatgctgttagggtttgttgggcttggtgctgtggttgaaacggcttacttaccggcaatacgaaatctttttcctgatactccgcgctgtttaggttttgatattcatcccgagaagcagcctgaaggggtcacacgttgcgcgtcgctcggtgaacttctttcccacccgctggataccctgtttatcaccacttcctccctgtaccatctcgaggtacttgagcaggcgctggcctcacccgcgtcgcgtattgtggtagaaaaaccgattgtcgccacgctgccccaaattgaaaaactgaaagcgctgctggctcaaccgggagccgccgaccgcgtgctggcgctcgatcactggatggcgcgtctcgatagcgtaaagcaatcactggtcgctcatgtttctgacatcgtcaaaatcgaaggctttttgcaggagccaagcgggtataacgccgaaggagagcccattgcgctcaacttcgccaccggcgagccagacgcgcgaacgcttcgccatccagatggtgtgattctggatatcggcacgcacgtgctggcgatgctgcgtgaaacggtgcgttacctgggcggcagtgacgatatgacgttgcaggtggtgacagcaaaagaccgcctgggccgcgaaatcgcaacgggcgatctgaccacggcggaaggcgaggcgcatttgcagggaagcatcagcggcgtgccggtggacatctggcttaacaaatacgcggggtctgcgggcgggcaaaagggattacgcttccatttgcgcgacgggcgcatcgtcagccacgaccgacgcggcgcagaagatgtgctggagctgattaagggtaaagaaattcagcgttggcatattcccggtacgatctacgagcattgccttgcggagcatattctgggggcaaaaagtctctttgaacgggatccgcaccaggtgagccgcacgacgcgccgcagggtcgaggaggtgacgctgctgctgaccttacagcaacagttgcgtggcccgcactgaacgcgatgtggtaaaattatcgcagacctgaacgctttgaaggagtcaccatgacgattacctgcccggattgccagacaccgctggagcccctgaacggggtagcgcactgcgaaagttgtaataaagatatcgcgctcgaagcccgctgcccggagtgtcatcagccactccaggtactaaaagcctgcggtgcggtggactatttttgccagaacggccacggtcttatctctaaaaaacgcgtggagtttgttcgggccgaaggttaatcgcacacgcagccttcacctttctgccacagttccaccagcgactcgggtgcttcctgctcgggtaccagcacgatgatatcggcgtagtgcgcctgattttggccggtccagataatctggatgcggaaatagcgctggtcaccgctgccgggggaagaggcttgcccgggcggctggccgcgcgggaaagcctgctcaagaatgctcaccaggcgctggcgctgggcctcattaagcgaggagagcgcaatggtgcgctggccgctcagcttagggataaaggcgacgccgccttcccgggccagctcaaccacggcgtcatccgtcagttccggaacctgcatttacagtactcccacctgttcccaggcttgtttaatggccgccccaacgtcgctaccggagcgtttctcgccgtgcgcgatcgtcagttttgcaaaggcatcaaaatccgcatcctgcgccaggttgcgatcgcaaaccgtgtcgtaccaggcataacccgctttttcccaggcgtagccaccgatcgccgttgcggccaggtaaaacgcgcggttggggatgccggagttaagatgcacgccgccgttatcctcgcgcgttttgatgaagtctttcatgtgcgcgggctgcgggtctttgccgagcagcggatcgtcgtaggcggtaccgggttcagacatggaacgtagccctttgccgttaatccccgctgccagcagcccttcgccaatcagccagtctgctttatcggcggtttgcttcagatggtattgcttcaccagcgagccaaacacgtctgacagcgactcgttcagcgcgcccgactgttcaaaataaatcagtccggcttcggtctcggtcacgccgtggctcagctcatgcgccaccacgtcgatggcaatggtgaagcggttgaagatttctccgtcaccgtcgccaaagaccatctgctggccgttccagaaggcgttctgatattcccgaccataatgcacggtgccggtgaggatcagccctttgttatcgagcgaatcgcgctgatattctttccagaagaaatcatgggtgatacccagataatcgtacgcttcatccaccgccacatcgccgttggagggctggccttcatagcgcacctggctacccggcagctcctgggtctgtttcgcatcgtagatgtcacgctcaagctgaccggctttattcacatgcggcgcggcgggtttgcccggcatatgggccatcagcgtctggacgtgggttaaggtctgaagggcgcagcgctgctgcggctcagaaccgctttcgataattcgacgaagaatatacggagggatgacgctatgaagatggggcatgctgctctccttattaaaaaaggcaatagcagcagtatagtttgtaaccggcgaagatttatccgcttttacgctggcgcgtttttttcaccggtttgatctctttcacctcactctcgacccagccgtcagaaagccgggtggtgagcacatccccggctttaacctgtttcgtttgtttcagcactttgccgtccgtcgcggtggtcacactatagccgcgagccagcgtggagagcgggctgacggcttccagatgggtgaccgcattgccgaaacgctcgcgcgtggtgctcaggcgtgagcggatattttccgcgaggcggaactcaagctgctggatacgcgtttgtgcgcgataaatcttcggctgcgggttttgctggttcagacgctgcgtgacgcgctgctggcgagctaccgcccgcttaagctggttatccagcgcgaagttcatccgctgacgcagacgttccagcacggtttgctgacgcgccagacgcaattgcggatgctgctgttgcagacgatggtgaagctgggtaaagcggcgggtacggttggcgaggaagtagtccatcgccatctccaggcgctgctgcccgttctggatctgacgcagcagctccagctggttacggctgactacctctgccgccgcggacggcgtgggcgcgcgtaaatccgcgacaaaatccgctatcgtcacatccgtttcatggccgacggcgcttaccaccgggataaggctggcaaagattgcccgcgccacgcgctcgtcgttaaagctccaaaggtcttccagcgagccgccgccgcgcccgacgatcaggacatcacactcctgacgcgcattcgccagttcaatcgcgcgcacgatctgccccggcgcatcgtcaccctgaacggcagttgggtaaataatgacgggcagggaagggtcacggcgcttcaggacgtgcaaaatatcgtgcagggccgcacctgttttcgaggtaatgaccccaacgcagtgagcgggtgagggcaggggctttttaaactgctggtcgaacaatccctcagccgaaagcatggctttgagctgctcgtacttctgttgcagcaagccttcgcccgcgggctgcatgctctcgacgataatctgataatcgccgcgcggctcatacagggtaatgttggcgcgaaccagaacctgctggccatgctgaggacggaacgtcacgcgacggttgctgttgcggaacatcgcgcagcgcacctgagcggtgtcgtctttcagcgtaaagtaccagtgaccggaagcaggctgcgtgaagttagagatttcaccgctgatccagacctgtcccatttcctgctcaagcagcaaacgtaccgtctgattaaggcggctgacagtataaattgagggggattgagaggataacatgtgagcgggatcaaattctaaatcagcaagttattcagtcgatagtaacctgctgagaggtgagcgcaagcatttttttcaaaaaagtgtggatgcaatcggttacgctctgtataatgccacggcaatatttaaccacccaggtcagagatattgcccatgctacgtatcgctaaagaagcactgacgtttgacgacgtcctcctcgttcccgctcactccaccgttctgccgaatactgccgacctcagcacgcagttgacgaaaaccattcgtctgaacattcctatgctctccgcagcaatggacaccgtgactgaagcgcgtctggctatcgccctggcacaggaaggcggcattggctttatccacaaaaacatgtctatcgagcgtcaggcggaagaagttcgccgcgtgaagaagcatgaatccggtatcgtgtccgatcctcagaccgttctgccaaccaccacgctgcacgaagtgaaagccctgaccgagcgtaacggctttgcaggctatccggtagtcactgaagacaacgaactggtgggtatcattaccggtcgtgacgtgcgtttcgtgactgacctgaaccagcctgtcagcgtctacatgacgccaaaagagcgtctggtgaccgtgcgtgaaggcgaaacccgcgacgtggtgctggcgaaaatgcacgaaaaacgcgttgagaaagcgctggtagtggacgcgaacttccacctgcgcggcatgatcaccgttaaagatttccagaaagcagaacgtaaaccgaacgcctgtaaagacgagcatggccgtctgcgcgtcggtgctgcggttggcgcaggtgcgggtaacgaagagcgcgttgatgcgctggttgctgcgggcgttgatgtgctgctgattgactcctcccacggccactccgaaggcgttctgcaacgtattcgtgagacccgtgctaaatacccggatctccagatcatcggcggtaacgtggcaaccggcgcaggcgctcgcgcgctggcggaagcgggttgcagcgcggtgaaagtgggtatcggtcctggctctatctgtaccacccgtatcgtcaccggcgtaggcgtgccgcagatcacggcggtttctgacgcggttgaagcgctggaaggtacnnnnnnnnnnnnnnnnnnnnnnnnnnnnnnnnnnnnnnnnnnnnnnnnnnnnnnnnnnnnnnnnnnnnnnnnnnnnnnnnnnnnnnnnnnnnnnnnnnnnnnnnnnnnnnnnnnnnnnnnnnnnnnnnnnnnnnnnnnnnnnnnnnnnnnnnnnnnnnnnnnnnnnnnnnnnnnnnnnnnnnnnnnnnnnnnnnnnnnnnnnnnnnnnnnnnnnnnnnnnnnnnnnnnnnnnnnnnnnnnnnnnnnnnnnnnnnnnnnnnnnnnnnnnnnnnnnnnnnnnnnnnnattccggtaatcgcggacggcggtatccgtttctctggcgacatcgccaaagcgatcgccgcaggtgccgcagccgtgatggtgggctccatgctggccggtaccgaagaatccccgggtgaaatcgaactctaccaggggcgttcttataaatcctaccgtggtatgggctccctgggcgcgatgtctaaaggttcctctgaccgttacttccagaccgataacgccgcagacaaactggtgccggaaggtatcgaaggccgtgtggcgtataaaggccgcctgaaagagatcattcaccagcagatgggcggcctgcgctcctgtatgggtctgaccggctgtggtaccattgacctgctgcgtaccaaagcggaattcgtacgcatcagcggtgcgggtatccaggagagccacgttcacgacgtgacgatcaccaaagagtccccgaactaccgtctgggctcctgataaatttccgcgcccggctcaatgccgggcgctttgttttgtttcacttgcctcggaattagcgtcaatgacggaaaacattcataaacatcgcattctcatcctggactttggttctcagtacactcagctggtggcgcgccgcgtgcgtgaactgggcgtttactgtgagctgtgggcgtgggatgtcacggaagcacagattcgcgagttcaatccaagcggcatcatcctgtccggcggcccggaaagcactaccgaagagaacagcccgcgtgcgccgcagtacgtgttcgaagcgggcgtaccggtgttcggcgtttgctacggcatgcagaccatggcgatgcagctgggcggccacgtagaaggctctaacgagcgtgagttcggctacgcacaggttgaagtcgtcaccgacagcgcgctggtgcgcggtatcgaagactccctgaccgcagacggcaaaccgctgctggacgtgtggatgagccacggcgacaaagtcaccgctatcccgtccgacttcgtgaccgttgccagcactgaaagctgcccgttcgccatcatggcgaacgaagaaaaacgtttctacggcgtgcagttccacccggaagtgacccacacccgtcagggtatgcgcatgctggagcgcttcgtgcgtgacatctgccagtgtgaagccctgtggaccccggcaaaaatcatcgacgatgccgtggagcgtatccgccagcaggttggtgatgacaaagtgatcctcggcctctccggcggcgtggactcctccgtgaccgcgatgctgctgcaccgcgccatcggtaaaaacctgacctgcgtcttcgtggacaacggtctgctgcgtctgaacgaagcccagcaggttatggacatgtttggcgaccacttcggtctgaacatcgttcacgtggaaggcgagcagcgcttcctggacgcgctgaaaggcgagaacgatccggaagcgaaacgtaaaatcatcggtcgcgtgttcgtggaagtgttcgacgaagaagcgctgaagctggaagatgtgaaatggctggcgcagggcaccatctaccctgacgtgatcgagtctgcggcctccgccaccggtaaagcgcacgtcatcaaatctcaccacaacgtgggcggcttgccgaaagagatgaagatgggcctggttgaaccgctgcgtgagctgttcaaagacgaagtgcgtaagatcggcctggagctgggtctgccgtacgacatgctctaccgtcatccgttcccaggcccgggtctcggcgtacgcgtgctgggcgaagtgaagaaagagtactgcgacctgctgcgtcgcgcggacgcgatcttcatcgaagagctgcacaaagctgacctgtacaataaagtgagccaggcgttcaccgtgttcctgccggttcgctctgtcggcgtgatgggcgatggccgtaagtacgactgggtagtctccctgcgcgcggtggaaaccatcgacttcatgaccgcgcactgggcgcacctgccgtatgacttcttaggccgcgtgtctaaccgcatcatcaacgaagtgaacggcatttcccgcgtggtgtatgacatcagcggcaagccaccggcgacgatcgagtgggagtaagcccataacctttcctgcgaagttataagcaggtaagactgataaaaccctctgattacagagggtttttctttttggccgatatccggcccggcggtgaactactggctcatctgccgcgattcacggcagccgatactgcgtcgccatgcgccgggtgcctgaccatactgacgcttaaagctgcggttgaaggactgctgagagtcaaagcccagcgcgatcgccacgttcagaatcggttcatcgctgtgggccaggcgctcaaccgatttttgcagcttttgcgcgcgaatatattcggcgagaggggagccggtatgctctttgaaaagccgctggaggtgccatttcgaatagccggctcgcctggagacggtttcaatgtccagacggctatcgaggttgttgtcgatccagtcgagtaaatcgtgaatgaatgcacccgtgttcattttgcttccccctacgccacgcattaaaaagcatctttgtttgttgcacttaaaggtgacccgtttttacattaattgcaagttttattgttgcatttaaatcccttctcaaaacgcgtgatttatcttcgccgcaaatagcacataaagtgcaacaattattcttgcacttaattaagcgccttcctacaatcgccgcgatagtgtattcgcaactgttacaattttgtggcgatgaacgacacaaatggccttcagtcagctaccggacaaaggaagtggcgcggcgcctcccgctgcgtcttgcccggcggctacaataaccggaataaaaataatgagcctgcaaaaaaacctggggtaactttcatctgagcgcgatgggggtggttttactctccgcgcttctcgtcgggtgcgatgacagcgtcgcgcaaaatgccgcgccgcaagcgcccgttgtcagcgctgctgacgtggtggtgaaatccattagccagtgggacagctttaacggtcgcattgaagcggtggaaagcgttcagctgcgtccgcgcgtctccggctacattgagaaagtgaattacacggacggccaggaggtgaaaaagggcgaggtgctgttcacgattgatgaccgaacctatcgcgccgcgctggagcaggcgcaggcgaacctggcgagggccaaaacgcaggccagcctggcgcgaagcgaggctaaccgtaccgataaattagtcaataccaacgtggtatcccgtgaagagtgggagcagcgccgttccgccgctacccaggcgcaggccgatattcgcgccgcgcaggcggcggtggacgccgcgcaacttaacctcgacttcaccaaagtgaccgcgcctatcgacggtcgcgccagccgggcgctgatcaccagcggtaacctggtgacggcgggcgacagcgccagcgtgctcaccaccctggtctcgcagaagacggtttatgtctacttcgacgtggacgagtcaacctaccttcactatcagaacctggcccgcagcgggcagcgggtgtccggcgatcatgcggcgctaccggtggagattggcctgacgggcgaggagggctatccccatcagggcaaagtggatttcctggataaccagctcacgccgggtaccggaacgatccgcatgcgcgcgctgctggataactcacagcgtcagttcacgcctggactctttgcccgcgtgcgtctgccgggcagtgcggaatttaaagccacgcttgttgacgataaggcggtgctgaccgatcaggatcgtaaatatgtttatatcgtggataaagacgggaaagcgcagcgccgcgacattacgcccgggcgtctggccgacggtttacgtatcgtacagcaggggctgaatcccggggataaagtcatcgtcgatggtttacaaaaagtgtttatgccgggtatgccggttaacgcgaaaaccgttgccatgaccgccagcgccgccctcaactgatcccttacctgagaatccaatccatggacttttcccgttttttcatcgacaggccgatttttgccgccgtactgtcgattctgatttttatcacaggattaatcgccatcccgctgctgccggtgagcgaataccctgacgtcgtgccgccaagcgtgcaggtgcgcgccgagtacccgggcgccaacccgaaagtgattgccgagaccgtggcaacgccgctggaagaggcgatcaacggcgttgagaacatgatgtacatgaaatccgtcgcgggctccgacggcgtgctggtgactaccgtcaccttccgtccgggcaccgacccggatcaggcgcaggttcaggtgcaaaaccgcgtcgcgcaggccgaagcgcgtctgccggaagacgtgcggcgtctgggcatcacgactcagaaacagtcgccaacgctgacgctggtggtgcatctgttttcgcctggcggtaagtacgattcactgtatatgcgtaactacgccacgctgaaggtgaaggacgagctggcgcgtctgcccggcgtggggcagattcagattttcggctcgggtgaatacgcgatgcgcgtctggctggacccgaacaaggtcgcggcccgcgggctgaccgcttcggacgtggtcacggcgatgcaggagcagaacgtgcaggtgtccgccgggcagcttggcgccgagccgctgccgaaagagagcgatttcctgatctccattaacgcccagggccgcctgcataccgaagacgagttcggcaacattgtcctgaaaaccacgcaggatggtacggtcgtccgactgcgcgacgtggcgcgtgtcgagatggggtccggcagctacgcgctgcgctcccagttgaacaataaagacgcggtcgggattggtatcttccagtcgccgggggcaaacgccatcgatctgtctaacnnnnnnnnnnnnnnnnnnnnnnnnnnnnnnnnnnnnnnnnnnnnnnnnnnnnnnnnnnnnnnnnnnnnnnnnnnnnnnnnnnnnnnnnnnnnnnnnnnnnnnnnnnnnnnnnnnnnnnnnnnnnnnnnnnnnnnnnnnnnnnnnnnnnnnnnnnnnnnnnnnnnnnnnnnnnnnnnnnnnnnnnnnnnnnnnnnnnnnnnnnnnnnnnnnnnnnnnnnnnnnnnnnnnnnnnnnnnnnnnnnnnnnnnnnnnnnnnnnnnnnnnnnnnnnnnnnnnnnnnnnnnnnnnnnnnnnnnnnnnnnnnnnnnnnnnnnnnnnnnnnnnnnnnnnnnnnggtggtgcaaacgcgtgctggaagcggtggtgctggtcgtgctggtggtgatcctgttcctgcaaacctggcgcgcgtcgataatcccgctgattgcggtgccggtatcggtagtgggcacgttcagtattctctacctgctgggcttttcgctgaataccctgagcctgttcgggctggtgctggcgattggtatcgtggtggacgatgccatcgtggtggtggaaaacgtcgaacgaaatatcgaagaggggctcgccccacttgcggcagcgcatcaggcgatgcgtgaagtgtccggaccgattattgccattgcgctggtgctgtgtgcggtattcgttccgatggcgttcctctccggcgtgaccggtcagttctacaagcagttcgcggtaacgatagccatttccacggtgatctccgcgattaactcgctgacgctctcgccagcgctggccgcgctgctgttgaagccgcatggcgccccgaaagatttcccgacccggcttatcgatcgtctgttcggctggattttccgtccgtttaaccgctttttccaccgcagctcgactggctatcaggggctggtgggcaaaacgctcggccgacgcggggcggtgtttgtggtttatttgctgctgctttgcgctgcgggcgtgatgtttaaagccgttcccggcgggtttattccgacgcaggataagctgtacctgatcggcggcgtgaaaatgccggaaggctcgtcgctggcgcgcaccgatgcggtgatccgcaaaatgagcgaaatcgggatgaataccgaaggcgtggattatgcggtcgcgtttcctggcctgaatgcgctccagttcaccaatacgccgaacaccgggacggtcttctttggcctgaagcctttcgaccagcgtaaacatactgcggcggaaataaacgcggagatcaacgcgaaaatcgcgcaaatccagcagggctttggcttctcgattctgccgccgccgattttaggtctgggccagggatcgggctattcgctgtacattcaggatcgtgctggtctgggctatggcgcgctgcaaaacgcggtgaacaccatgtccggggcgattatgcagacgccggggatgcatttccctatctcaacctaccaggcaaacgttccgcagctggatgtacaggttgaccgtgataaggcgaaagcgcagggcgtgtcgctcaccgatctcttcgggacgctgcaaacctatctgggctcgtcttatgtgaatgacttcaaccagttcggtcgcacctggcgcgtaatggcacaggccgacgggcagttccgcgacagcgtggaagatatcgcgaatttacgcacccgtaatagccagggtgaaatggtgccgattggcagtatggtgaaaatcacgaccacctacggtccggacccggtgatccgctacaacggctacccggcggcggatctgattggcgatgccgacccgcgcgtgctctcttccgcgcaggcgatgacgcagctggacggtatgtctaagcagatcctgccgaacgggatgaatattgaatggacggacctgagcttccagcaggccacccagggcaacacggcgctgatcgtcttcccggtcgcggtgctgctggcgttcctggtgctggcggcgctgtatgaaagctggacgctgcccctggcggtgatcctcatcgtgccgatgacgatgctctccgcgctgttcggcgtctggctgaccgggggcgataacaacgtcttcgtgcaggtagggctggtggttctgatggggctggcctgtaaaaacgcgattcttatcgtggagtttgcccgcgagctggaaattcagggcaaaggcattatggaggccgcgctggaagcgtgccgcctgcgtttacgcccgattgtaatgacctctatcgcctttattgccgggaccattccactgatccttggtcacggggcaggggcagaagtgcgcggcgtcaccgggatcaccgtgttcgccgggatgctgggtgtgacgctgtttggtctgttcctgacgccggtcttttacgtgacgctgcgtaagttcgtgacgcgcggtaaagcggaaagagaggtgttgcctgcgtaggacgtagcagatagcaaaaagccgccttcacaatgaaggcggctttttttttcgcagtctgtcaggattagggcgcttttttatgctgtgtgcagagttccggcaccggatcgcacccgctggtatcggcttttttcacctcttccagcgcgctggcgacggtatggcgcgctaaaaccgctaacgaagcctgctccgcttcatcagcgattgatttgaagtaccagcaggcgttggcgctgaccacgcagcgggccgggacgtcaggacgggacgcccacagctttttatcttcagtgacggaaaggtagatatcacgcagggtaatctcttccgccgggcggccaaggtgaatagagccgttgcggccaagcgtggagacgataatgccgtcgcgggcgagaggaaccattaatttgcggataaagctcggattcgcttccaggccgtaagccaggattgcactcgtcgaacgttcacccgattgctccgccatcgctacgctgagaaccatctgcaaagctgtcgggaagcggtaatctaacatttttctgtcctgggttgcggtgaatcttgttctttttggcaccgcagaggtgaataatcagtaagtaacaatataacaaatacggtaattttattgaagcaatctgcggcatacgtgaagtaacgctgcgctgacacatgtcaggacgtgtagcgccgcgtttacgttcatgcgaacgccggattcgggaaatcaacggtcaccataagaccgccttcggctgacgtactcagattgaccctgccgttgtgttgctgcgtaacggctttaacgatagcaagccccagtccactcccgctttgggtctgattaggatcgcggaaaaatctgtcgaacacgcgctcccgcaattcaaccggaatgccgggacccgcgtctaagacgcgcagctgagcggacttgtcacgcgattgcagttgtacctcaatgcgtccaccctcagggctgtacttcacggcattctcaattaaattgtcgatcagcgataccagacgttcccgaatgcctgtgatatggatttcatcatcggcgatgaattcaaactcaattctgcgcccggacgccagcggttccagggcagccattcgctcctgaataagcgtcgtcagcggcacaggcgacatcaccgtgctgatgtgcgcttcgctgtgcatcatcagcagaagctgattgacgagacgcgcagcacggctattgctgcgaacaatgcccgcaagcagctcctgctggctttcgctgatgacccaggactgcaacgcctcgacgttgatccgcatcgcggccagaggcgtacgcagttcgtgtgcggcatcggcaataaacattctttccctttcggcgctttcccgcaccctggccagaaagtcattaatcgcgtcgaccgtctggcgaagctccctgtgtctggggacggcttttaaaggcgagagatcgtccggcgtgcgcaatgaaatttcattcaccaccttgttccaggggcgcatcgcgatgcggatggacagccacgcggggaacagaagaaaagggatgcatatcatcagcggcatgacgtagtagccgcgcgagttcagatagataaagaaattccagctaccggcaggggtaaaaagggtgacttccacgtcggagtgcgcggatttgagggtacggctcgtccatgtatggtcctcactctggacatgctgcatgacccccagacggctattttttacccccgtcggcgcaccatccgaagaaaaaataatctcgttattcttgcgaacaatgaggttgatggacagctccggatcttcgccgccgccatagccctcccgcagagccttgctgaacgctgccagcacagcatcacgcgcctgcggacgatcgtccatactctccaccagggaaaaaacggtttcataagtctcactgcccgtcagtatgggagggctacgcaggtcttccagcaaaatgaaggttaaaaagagacaccagagcaacgtaagcagcagcatctgggcgaccagcattcgcctgaccagcgtgggaagccggaggtggtgccaaaaattacgcatcaacctgccgccttctgaacgggtacggtatcaatgacatacccaacgcctcttaccgttcgcacaaaaccatcgccaatttttcgccgcaggttacccatatgcacgtcaagcgcgttgctgaggttttctttcgtgccaaatatcctttcttccagataccgtcgcgtaagcacgcgatcggcgcgcagcattaacgtttcaagcagcgcatattcgcttgccgtcagctcaacgtggcgtgcgctcaccgttacgcgacgcgtcggaatatgaagcgacaaaccgcgaatttctattgcctcattttcaaaaccgtaactgcgccgcgcaagggctctcacgcgcgccagcagttcggcgagaacaaaaggtttgaccagataatcgtctgcacctgcatccagcccgcacaggcggtcctgtagcgtgcctcgcgccgtcaggatgatgacggggacgcccttaagctgttgacgcaggcgcgtcatcaggctcatgccatcgccatcgggcagccccaggtcgagcaaaataagttccggcacgcagatcccaagctgatgcagcgcatcctctttgcggcgtacccatatgacatcaaatccttgatctgcaagggcgatacgcacgccattgccgagatccaggtcgtcttcaattagtagaattttcacattggtaactgtatcaacagtgcatgaagaacaactgaagaaaaaacggtaacaggaattcttcagggtttacagaaccttcacgtgcttcagcatttcttcatttacggctcataagaaccttagggtgagtattcagaatgagcgctctggcgtttaacaccgcttgtatcgcaattatctgaatccaaagggcttctttaatgagaaacatcacactgcgtaatagtttcccccgttcacgcatcggtcgcagcatgaaaagcatcttgccgggggccgtcctggcgttactggccaccccggcactggcgacagagcagcctcagggcaacgtgttaaccctgggaggcggcgtggatgttgcgccacgctattccggttcggacaagagccgggtctctgcggctcaggtggttgattacgcgatggccaatggtttttttgtcagcaccacgcgggggatcggctacggcaacagctttggtaacctggactacaacgcagcgctgagctatcgcgcaggacgtaaggatcgcgacgtaagcagcgattcnnnnnnnnnnnnnnnnnnnnnnnnnnnnnnnnnnnnnnnnnnnnnnnnnnnnnnnnnnnnnnnnnnnnnnnnnnnnnnnnnnnnnnnnnnnnnnnnnnnnnnnnnnnnnnnnnnnnnnnnnnnnnnnnnnnnnnnnnnnnnnnnnnnnnnnnnnnnnnnnnnnnnnnnnnnnnnnnnnnnnnnnnnnnnnnnnnnnnnnnnnnnnnnnnnnnnnnnnnnnnnnnnnnnnnnnnnnnnnnnnnnnnnnnnnnnnnnnnnnnnnnnnnnnnnnnnnnnnnnnnnnnnnnnnnnnnnnnnnnnnnnnnnnnnnnnnnnnnnnnnnnnnnnnnnnnnnnnnnnnnnnnnnnnnnnnnnnnnnnnnnnnnnnnnnnnnnnnnnnnnnnnnnnnnnnnnnnnnnnnnnnnnnnnnnnnnnnnnnnnnnnnnnnnnnnnnnnnnnnnnnnnnnnnnnnnnnnnnnnnnnnnnnnnnnnnnnnnnnnnnnnnnnnnnnnnnnnnnnnnnnnnnnnnnnnnnnnnnnnnnnnnnnnnnnnnnnnnnnaggctcagctatcgttgtgccagggctgggatacagggtgactgactggctgaccgtgcagttacaggcagaggtcccggtttctgagagagacaatggtgaagctgtgcatttcggcattgccagcccgctctatacatctccgaaaaatgcgttaacgctggcgctgaccggtagctggggatccagtaagtatgtgcaaacctactacggggtgaatgccgcccagtcggccgcatcgggttttgcccgacacgatgccggatcgggaatatatgcgtattcgctgagcctggactggacccataagcttacctcccgctggagcctgcttgccgcagctggcgttacgcagctgacgggagaggctggcgatagccccattgttcagcgaaaaacgtctcctgtgggaagtttgaaggtgacgtacagcttctgatggttcagcgagggggaaggtgcgtttgtgacaaaaccgcacataaccccgttgcaggagccggaagtgcataaagcccgcaggatggcgtggcccgaagtcggaccgttcatcatgcgggcttttttatcactgttgacccgataacgcctgttcaatcgtacgggtaatgacgtccggctgactgaccatcgatacatggcttgccgctacctccgtggtgttggcgttgattttcttcgccattgcgcgctctagctcaggattgatcatccggtcatttttgctgaccacataccagctcggtttgtcatgccaggcggcatgcgcgattttctccccaaacgcatcggccttaatggggccctgcgtcgcggcaatcacgctgcgctcaacgtccttcacgtcaggggcaaaattctcgctgaccgcttttgtcggcagatataaatacccctctgtggttttagcgaggctggcggtccctggcggagcagggtagctatttgccagatctgccgtcgactggccggaatccggcgcaaaagcggcaacgtaaaccagtgacttcacgcgggcattgtttcccgcctcgctgattaccgtcccgccccaggagtgaccgaccagcaccacatccccatgagcccgggcgatagcacgctgcgtggcggcgacatcatctttcagagacgtgagcggaagttgtaccgcaatgacctcggtatggtgtttttgcagccgggtaatcaccttattccagctgctgccgtcggcaaacgccccgtgcaccagcaccacgctggctttcgtctctgccagcgcgctggtggaaaccgccagcaccatcgctgttaatacagacaatgctttcataacaggctccttaaaagtgatgaaccgcggcgtgtggcggcacggtgaattcaacggttttatggtcgatgggtttatgcgtcgggtcggcaacgacgatcgtcactttgtgctttcctgcgggcagcccgaccaggatcaccggctcgccgctggtatcagcccagtgccagggcgcgtcatccaccacaacgtgaatatggccgatacgcggagtgactttcagcgcgtcgggtccaaatacaggttcaatgcgcaggttttcgacacggtactgaataaagaccgcacctttacttagcggtcccgccagcggcggatcgacaatcagttttgctggcggctgggggtgttcaggcggggcgacggcggctggaccgttgacatcagcggcgctcaggccatccaacggtgcggccattgcgccagcaaaggacgtcagcgcaaatacaggaagcaggaaatatcgacgaatcatctgtgtctctcctcatcagtttattatggcgagggatacagaagaccatttttatgtatcggggatgtttgcttttgcgggcgttttgtaccggtttgtcagcgtagcgctcgggatacagtgcgatacagtttgtcttccgggagcgaacacgctttagcgctcgggcgaatccaccacaagacctgattgctgcgactgaattttgtcctgatggtgataccaggcgccaatggaggaataaacaaagcggccaaagaaaaacaggaaactgatgagcagtatgatgcgggtcatccgggtgttaaatcgatgtcgttttcgcatacgcgtagcctgactcactttcttttcctgagtatacccttttgggcgatacggctattaaggcacagccgcaagtcagggtcaattcggcgaaatgtaaaataccgtcaatgcttacattaatttatgttattaaaaacaacgcttttatttatcgcattgataattacaggaaaaatattcaaaaaaaacgtaagaaaggtttattcagataaattaatttgatttaggtcaaccgcatcccgtcgttgctatttaaaatccctcctccactgtgcttgccaggaattttccgggcaatgtgtacgtcaggttggatgcctgtcttcatttaccctctggatcgcaagggttgtaaacgagcatctatgaatattcatcatatcctgaagcaaaataaagaccgctggtgggctcttcctcttattttacccgtcatgttactcccggtgctaagtgtggctaataccttaacgcagctgggcgacggtatcgttgcgctctattatctaccgctctcctttttgctgacgctgatgttattctttggcctggaagccctccccggggtggtggtgtcgctgtttttacgttattacccctccgttgggttatttgaagccatggccggcattctgcattttatcgttcctctggtgctcagctggggcggttatcgcgtgtttgcgccccggcgcaatatgaccgcttacggtgacatacgcctgatggggcagcgtattttctggcaggtgttttgcccggcaacgctatttctgctgctgtttcagtttgcggtctatctcggcgtctatgagagccgccagagcctcgcaggactgaatcccctcaatattcggacccttattaactatcaggggctgctggtgagcgggctgacgggcgtgccgctaagctacctgctgatccgcctgatacgtcatccgcgctatatcaagggactgatgtcccagctccgcgcgcaaatagacaaaaaggtgacggcctttgagtttgtggtgtggtttttagccctgggcgggttgctggtcatgctgctgctgcccatgaatgcaaacagttccattttcagtaccaactacaccttgtccctgctgatgcccgtgatgctctggggggcgatgcgctttggctacaagctgatgtcactcatctggacgccggtcctgctggtgtcgattcactttttttatcactacattccggtgcaagaggggtatggcattcagctggcgatcacctcatccagctatctggtcttttccttcgttgtgacgtacatgtcgatgctggcgacacgtcagcgggccatcaatattcgctcccgcagtcaggcttttctcgatccggtggtgcatatgcccaacctgcgggcgctgtcgcgcgagctggccagtcatccgtggtcagcgctctgtttactgcgcgtgcccgagctggaggtgctgggacgcaattacggcgtgatgctgcggatccagtataaacagcagctggcgcaatggataaacggtacccttcagcccaatgagcgagtctatcacctcacggggtatgacatggcggtgcgtctggaggcggagtcgcatcaacagcgcattgaaacgctggacgagcatatcaagcagtttgtttttatctgggatggtatgccggtacagcctcaggtcggcgtgagctattgctatgtacgctcacccgtcaatcatctctatctggtgctgggggaactgggcatcgtggccgatctctccctttctaccaaccacccggaaaatcttcagcagcgcggggctgttcatttgcagcgtagcctgaaagataaggtcgcgatgatgagtcgtttgcaggccgcgctggagcaggacgcttttaccctgctggttcagcccgttcgcgggctgcgcggtgattgttatcacgaggtgctgctgcgaatgcgtgatgataacggggcgctgatctttcccgagcagttcctgcccattgcacaggagtttgggttatcgtcgcgtgttgatttatgggtactggagcgtacgttgagttttctggcacagcaccgccagcgtttgccgggccagcgctttgcgatcaacctcgcaccttctaccgcctacagggcgcagttcccgcttgaagtgagccgcctgttagccaaatacgccgttgaagcatggcaactgatctttgaagtgaccgaaagcagcgcctttggtcatgcggatctggcggcgtcgaccctcaggaaattacaaaaaatgggcatccggatcgccattgatgattttggcacgggctacgccagctatgcgcggttaaaaagcgtggacgcagacattctcaaaatcgatggcggttttattcgcaatattgtcagcaacagcctggattaccagattgtggcttccatttgccatctggcccggatgaagaaaatgctggtggtggcggaatatgtggaaacggaagagatacgtagcgcggtgcacgcgctaggtatcgattatgtgcagggctatttgattgggttgccggctgagcttgatacgttgctcaacacgcagccttctcaggagagcgcctgagccgttacgctgccgcctcagaactctcttcttcaatcttcaacagccagccggtgaccgcttcccagtactgctgctctttttccagatccagcagcaccagcgcgttctggctaaaccagtcgtgtgggaagctcagcgtccagtgatagtcatccgtttttagcttcagcgtcggcggcgtggtggttgcctgtcgctgattattgagcaacacgcccaggcgcaacagctgaatgagcggcaggaactgctttttcttaaataacgtaaagcgcggcagatcgtcgagcttgatggctttgcggtgatagcgcaccagcgtcgccatcatggtttgctgctcctggttgaaaccaggcagatcgctgttttgcagaatataggctgaatggcgatgcattccgctgtggttaatgttcagccccacctcgtgcaacatggcggcccatttcaacagcgcggccagctgcggatgcgccagcttcggattctgctcctcccactgctcgtacatctgaaccgtggtttcgagcacccgtttcgcctgttcgcggtcaatgttgtactggttggccaggctctgcgcggtgcggctgcgaatatcctgatgacggaaacggccttccatctcatacagcacgccttcacgcagggcgccgtcagagaggcgcagctctttgatcgccagcgcgtcaaacacgccgcagaggatcgccagccccggtacgaacacggctttacgttcgtcggacagacccggcagactcagggcgtcgaagctcttatgcttaagcacctcttcggtgagtttcaccaggcgctcaggcgtaataaagccgtctttttcacccattgccagcagcacttcatgggccgctttaatcgaacccgatgcgcccagcgccacgttccagccctgaatacggtattgccaggccagattttccagtttttgtacggcggccatgcgcgcgcgctggaagttttcgcgggtgatgacgccgcccgggaaatacatctgcgcgaagctgacgcagcccatacggcggctttccaccagacgcggctcgaagtcttcgccaatcaccagttccgtggaaccaccgccgatatcaatcaccagcttgcggcctttttccggctgcgtatgctccacgcccataaaaatcaggcgcgcttcttcgttaccggagatgatctcaatcgggtaggggataaccttttccgcgcgcttaagaaattcaggcgcgttcagcgcctggcgtagcgtatgcgtcccgacgatgcagacgctggacggcgaaaagccttgcagacgttctgcgaacagcgacagacagttcagcccgcgctccatggcctcttcgctcagcatgttacgcgcgtcgagaccatcggccagatgcacacgctgcttcagacgaccgatgatctgcatcgcgccatccacctcgcgggcgatgaccatatggaaactgtttgagccaagatcgaccgcggcgaactcctgcgggcgtggggtattatcgtttattggcataggttaatcggattgctcaagtgatttaatgtaatcgtaaatcgccagctgcgagcgcactttacggcgattgccgcgcggtacatagcgattactgagttctttgtcgatataacgtgctttcaccgtatcgctgaacaggatctcgataatgtctaggatacgctgcttaaggcgaggatccagcagcggtgccgccacttcaatacggtaatcaatgttacgcgtcatccagtcggcggacgagaggtatacgcgcttatcaccggcgttatcgaaaatatagacgcgatcgtgttcaagatagcgatccacaatgctgatcacgcggatattgtcgctgatgccttccagttccggaatgagcgagcacatgccgcgaatgagcagatttaccggaacgccggagctggaggccgcgtacaggcggtccaccagccctttgtccaccagattgttgagcttcagcgtgatgccggacgacaagccgttctgcgcattggcaatctctttatcgatcatatcgtacagcaggcgccgtgagttctgcggtgacaccagcagataatcgaagctcaccgggcggtacgggttctcaatgaagttgaacacccgacgcacttcgttggtgatgcgggcatcggcagtcagcagcgaatagtcggtgtagattctcgcggttttctcgttaaagttcccggtaccgatatgggcgtagcgcaccacgtcgtcgccctctttacgggagatcaggaacagcttggcgtgaattttcagccctggcgcggagaagatgacgtgtacgcccgcttccgtcagtcggcgcgcccagtggatgttggcctcctcgtcgaagcgagcctggagctcaaccaccacggtcactttcttgccgttgtgcgccgcgtggatcatcgcatcgatgatacgggaatctttcgccacgcgataaatgttgattttgatcgccagcacgttcggatcgaacgaggcctgacgcagcaattccagcacgtgttcaaaggtgtgatacggatagtagagcagcacatcccgttcgcggatggcgtcgaacccgttgcggaacttatcgaaccagatatggcgcaggcgcggcagcggtttgttcaccagattggccttgccgacgttcgggaagccaatgaaatctttaaagttgtggtaacgcccaccggggataatggagtcgtagcgggagatggtcagcttatcgcgcagcatctccaccatcgcgtccggcatatcgcgttgatagacaaaccgcaccggctccgccgtcaggcgctgcttgaggctggaagacatcagctccatcatgctggcctccatctcatgcaccagatcgtactcggcgtcacgggtcatcttcatcgagtaggcgttgagcgcgtcgtaatcaaagaagcctttgaagatatcgtccaggcagtagcgcaggatgttatccagcaggatcatcggcttacgccggcgcggggtttccggcggcaggtttacaaagcgtgggactttatcagacggtatttccagcaacgcgtagttaatggtctcaccacgaatgatttctaccgccagataggtgtaatcatctttcaggaactgcaccagatcggtttcacggttgatcagaatcggggtaatgtgctggcgcagataatgtttgaaatagtggcgcagccagttttgctgattcgcggagagctggcgttcgttgatcaggaagatttggttgcgtgccatttccagcagcagctcgttatagaggccatcaaattcctgatcggctttcatgacgcgagactggatttttccaagcagatgccgggagtgggagttcaagccctgttcttcgctgatgatgattcggcgtttcagttcggcgaagcgaaccttgtagaactcatccagattgttggaatagatgcctaaaaaacgcatacgttcaatcagcgggttgcttttatcggccgcttcctgaagtacacgttcgttgaatgctaaccagcttagctctttctcgatgtataacttttcctgacccattacagctcacactccagttcaatcacaggacgtggtaaatccgtctcgtccttattatggcgagcatttccacgatatgtccaacagtgccagaaaagtatgacagttatttttttgttggggaatttagagggttgggggaggggggggcgggtggcgctgcgcttaccacgacctacgggaccgtaggcccgtgcaagcgaagcgccgccgggcaattcaaacagactactcttcagccgcataaccctgcgggggcaacttcacgccgtccagccaggctgcgccgttgcgcatctccagacgtccatcgacaaaccagcttaccaccagcggataaatggcgtgttcctgcgtctgcacacgttcggtcacgtcgtcttcgttgtcgccgtcaaagaccggtacttttgcctgcaaaatgaccggaccgccgtccagctcgtcggtgacgaaatgcacggaggtaccatgctcctcatcgccgttctccagcacctgacgatgggtgtgcagaccggggtattttggcagcagggaagggtggatattgagcagtcgtccggcgtagtgtgcaacaaaagccgggctcaggatgcgcatgtagcctgccagcaccaccacgtcaggcgcgtaggcgtcaatctcctgcaccagctcacggtcaaaggcttcacgcccggcgaactggctggcttccagcgcgtgcgcaggaatgttcgcttcccgcgcgcgctcaaggccgaatgcatcggccttgttgctgaatactgcccgaatggtgccattgattttcttctgtttgcaggcgtctatgattgcctgcaaattgcttccgttgccggaaatgagcaccacgatgtttttcattcaatgaccacacgctgttcggaatcggaagctttaatcgtaccgattttccacgcgttttcacctttttctgtcagcagcttaaccgctttatccgcttcgctggcgggcagggcgataaccatgcccacgccgcagttaaaggtgcggtacatttcgtgagagctcacgttgcctgcggtttgcagccagttgaagacggacggccactgccatgaggatgcgtcgatcaccgcctgggtattgtccggcagcacgcgcggaatgttttcccagaagccgccgccggtgaggtgagcgatggcgtgcacgtcaacgttctcaatcagctccagcacgtttttcacgtagatgcgggtcggggccagcaggtgatcggccagcggtttgccgtccagctcggtggtcagcgggtcgcaaccgctcacttcgaggattttacgcaccagagagtagccgttggagtgcggaccgctggaggccagcgcaaccagcacatcgccgtcagccactttgctgccgtcgataatttctgatttttctaccacgccgacgcagaagcctgcgacgtcataatcttcaccgtgatacatgccaggcatttccgcggtttcaccgccgaccagcgcacagccggattgcaggcagccttcggcgataccgttaatgacgnnnnnnnnnnnnnnnnnnnnnnnnnnnnnnnnnnnnnnnnnnnnnnnnnnnnnnnnnnnnnnnnnnnnnnnnnnnnnnnnnnnnnnnnnnnnnnnnnnnnnnnnnnnnnnnnnnnnnnnnnnnnnnnnnnnnnnnnnnnnnnnnnnnnnnnnnnnnnnnnnnnnnnnnnnnnnnnnnnnnnnnnnnnnnnnnnnnnnnnnnnnnnnnnnnnnnnnnnnnnnnnnnnnnnnnnnnnnnnnnnnnnggctgcggtatccacgtccagcttgccggtcgcgtagtaatcgaggaagaacagcggctcggcgccctgtaccaccaggtcgttgacgcacatcgccaccagatcgataccaatcgtatcgtgacgcttaagatccatcgccaggcgcagttttgtaccgacaccatccgtacccgagaccagcacaggttcacgatatttttgcggcagcgcgcacagtgcgccgaatccacccaggccacccatcacttccgggcggcgggtttttttcaccacacctttgattcggtcaaccagcgcattacctgcgtcaatatcaacaccggcatctttgtagctgagagaagttttgttggtcacggcttaaatccccacgcgattgcatagctagtaagaaaaatcggcgcaattctaacagtccaggcaaacgtttgcgagcctattctcggcgcggggatctttttttctgtgcgagttgtccagggcaacaaacttgactctgttcacgaaaatgaaaccggtttcggcgatctgcttgcaacggctatcccctttgcacatcatcaaactgaaaccggtttctgtaactgtttttgcagaaaataacgcagaatgagggatagcgaatgtcaggatttaaagcaggttttctgtggggtggggccgttgcggcgcaccagctcgaaggcggctggaaagagggcggcaagggcgtgagcgttgccgatgtcatgacggcaggcgcccacggggtaccgcgtgaaatcaccaacggcgtgctggaggggaaaaattacccaaaccacgaagccatcgacttttatcaccgctataaagaagacatcaaactctttgccgagatggggttcaaatgcttccgcacctccatcgcctggacgcgtatcttcccgaaaggcgacgagctggagccgaacgaagcgggactcaaattctatgacgatctttttgacgagtgcctgaagcacggcatcgagccggtgatcacgctttcccacttcgagatgcctttccacctggtgacggaatacggcggctggcgcaaccgtaagctgatcgacttctttgttcgcttcgcgaaggtcgtttttgagcgctaccagcataaagtgaagtactggatgacctttaacgagatcaacaaccaggccaacttccacgaagactttgcgccgtttaccaactccgggctgaaatatgcgccgggagaagatcgcgagccggtgatgttccaggcggcgcactatgagctggtggccagtgccctggcggtgaaggcggggcgcgagatcaacccgtcgctgcaaatcggctgcatgattgccatgtgccccatctatccgctgacctgtgccccggacgatatgatgatggcgatgaacgccatgcatcgtcgctactggttcaccgacgttcacgtgcgcggcaagtatccgcagcatctgctcaactactttgaacgtcgcggcttcgcgctggatatcaccgaagaagataaagtggcgctgacgcagggctgcgtggattacatcgggttcagctactacatgtctttcgccaccaaagcgacggcggacaacccgcagctggactacgacgagagcaagagcctggtctctaacccgtacgtgcagaaatcggactggggctggcagattgacccggtggggcttcgctactccctcaactggttctgggatcactaccagctgccgctgtttatcgttgagaacggctttggcgcgatcgacgtgcaggagagcgacggcacggtgaacgaccagtaccgcatcgactacctttccgcgcacatccgcgagatgaaaaaagcggtggtagaggatggcgtagatctgatgggctataccccgtggggctgtatcgacctggtctctgccggcaccggcgagatgaaaaaacgctacggctttatctttgtcgataaagataacgaaggtaacggcacgctgaaccgcagcaagaagaaatcgttcgactggtataagcaggtgattgccagcaacggcgataacctgtaattgtcgggtggcgctaacgcttacccgacctacactacannnnnnnnnnnnnnnnnnnnnnnnnnnnnnnnnnnnnnnnnnnnnnnnnnnnnnnnnnnnnnnnnnnnnnnnnnnnnnnnnnnnnnnnnnnnnnnnnnnnnnnnnnnnnnnnnnnnnnnnnnnnnnnnnnnnnnnnnnnnnnnnnnnnnnnnnnnnnnnnnnnnnnnnnnnnnnnnnnnnnnnnnnnnnnnnnnnnnnnnnnnnnnnnnnnnnnnnnnnnnnnnnnnnnnnnnnnnnnnnnnnnnnnnnnnnnnnnnnnnnnnnnnnnnnnnnnnnnnnnnnnnnnnnnnnnnnnnnnnnnnnnnnnnnnnnnnnnnnnnnnnnnnnnnnnnnnnnnnnnnnnnnnnnnnnnnnnnnnnnnnnnnnnnnnnnnnnnnnnnnnnnnnnnnnnnnnnnnnnnnnnnnnnnnnnnnnnnnnnnnnnnnnnnnnnnnnnnnnnnnnnnnnnnnnnnnnnnnnnnnnnnnnnnnnnnnnnnnnnnnnnnnnnnnnnnnnnnnnnnnnnnnnnnnnnnnnnnnnnnnnnnnnnnnnnnnnnnnnnnnnnnnnnnnnnnnnnnnnnnnnnnnnnnnnnnnnnnnnnnnnnnnnnnnnnnnnnnnnnnnnnnnnnnnnnnnnnnnnnnnnnnnnnnnnnnnnnnnnnnnnnnnnnnnnnnnnnnnnnnnnnnnnnnnnnnnnnnnnnnnnnnnnnnnnnnnnnnnnnnnnnnnnnnnnnnnnnnnnnnnnnnnnnnnnnnnnnnnnnnnnnnnnnnnnnnnnnnnnnnnnnnnnnnnnnnnnnnnnnnnnnnnnnnnnnnnnnnnnnnnnnnnnnnnnnnnnnnnnnnnnnnnnnnnnnnnnnnnnnnnnnnnnnnnnnnnnnnnnnnnnnnnnnnnnnnnnnnnnnnnnnnnnnnnnnnnnnnnnnnnnnnnnnnnnnnnnnnnnnnnnnnnnnnnnnnnnnnnnnnnnnnnnnnnnnnnnnnnnnnnnnnnnnnnnnnnnnnnnnnnnnnnnnnnnnnnnnnnnnnnnnnnnnnnnnnnnnnnnnnnnnnnnnnnnnnnnnnnnnnnnnnnnnnnnnnnnnnnnnnnnnnnnnnnnnnnnnnnnnnnnnnnnnnnnnnnnnnnnnnnnnnnnnnnnnnnnnnnnnnnnnnnnnnnnnnnnnnnnnnnnnnnnnnnnnnnnnnnnnnnnnnnnnnnnnnnnnnnnnnnnnnnnnnnnnnnnnnnnnnnnnnnnnnnnnnnnnnnnnnnnnnnnnnnnnnnnnnnnnnnnnnnnnnnnnnnnnnnnnnnnnnnnnnnnnnnnnnnnnnnnnnnnnnnnnnnnnnnnnnnnnnnnnnnnnnnnnnnnnnnnnnnnnnnnaagccgactttgatagtcggcttttttttgaataaaaaccaacaatgacactcagaggaaaacactatgacgcgccgtgctatcggggtgagtgaaagaccgccgcttttacagacaatcccgcttagtttgcagcacctgttcgccatgtttggcgcaaccgtgctggtgccaatcctgtttcacattaacccggctaccgtgctgctgtttaacggcatcggtacgctgctttacctcttcatctgtaaaggcaaaatcccggcctatctcgggtcgagcttcgcgtttatctccccggttctgctgttgctgccgctgggttatgaggtcgcgctgggcggctttatcatgtgcggcgtgctgttctgcctggtctccttcattgtgaagaaagccggtaccggctggctggacgtgatgttcccgcctgcggcaatgggggccatcgttgccgtcatcggcctggagctggcgggcgtggcggcgaacatggccgggctgctgcctgcggacggtcagtcaccggattccaaaaccatcattatttcgctggtgacgctgggcgtgacggttttcggttccgtcctgttccgcggctttatggcgattatcccgatcctgatcggcgtgctggcgggttacgcgctctccttcgtgatgggcgttgtggataccaccccgattgccgaggcgcactggttcgcgctgccaaccttctacaccccgcgctttgaatggttcgccattttcaccattctgcctgccgcgctggtggtgattgctgagcacgtcggccacctggtggtgacggcgaacatcgtgaagcgcgacctgatccgcgacccgggcctgcatcgctccatgtttgccaacggtttctccaccatcatctctggtttcttcggctccacgccaaacacgacttacggtgagaatatcggcgtaatggcgatcacccgcgtctacagcacctgggttatcggcggcgcggcgatcatcgccattctgctctcctgcgttggtaaactggcggcggcgatccagattatcccggttccggtgatgggcggcgtttccctgctgctgtacggggtgatcggtgcctccggtattcgcgtgctgattgaatccaaagtggattacagcaaggcgcagaacctgatcctgacctccgttatcctgattatcggcgtgagcggcgcgaaggtgcacatcggcgcggcagagctgaagggtatggcgctggcgaccatcgtcggcgtcggcctgagcctgattttcaagctgatctcggtgatccgcccggaagaggtggtgctggacgcggacgaaagcgaaaaagcgccacattgatcgtcatgccgggcgaaggatcgcccggttctctccttgcaggttccgtgttaaactccattccgattttatgtaagatctctggttgaggtatttctgaacggaccggcacagctctctctgccactttatctccctgacgacgaaactttcgcgagtttctggccgggtgataacccctctttactggctgcactgcaaaacgtgctgcgccaggaacacagcggatacatctatatctggtcacgcgaaggcgcgggacgcagccacctgctgcatgccgcctgtgcggagctttcggcgcgcggtgacgcggtaggctatgtgccgctggataaacgcacctggtttgtgcctgaagtgctggagggcatggaacatctctccctggtctgcatcgataatatcgaatgcgtggcgggggacgaaccgtgggaaatggcgatctttaacctctacaaccgcatcctggagtcgggcaaaacccggctgctgatcactggcgatcgtccgccgcgtcagctcaatctggggctgccggatctggcgtctcgtctggactgggggcaaatctacaagttgcaaccgctgtcggatgaagacaaactccaggcacttcagctgcgcgccagactgcgcggatttgaactgccggaagacgtgggtcgtttcctgctcaagcgtctggatcgcgaaatgcgcacgctgtttgatacgctcgatcagctcgatcgcgcctccattaccgcccagcgcaagctgaccattccgtttgtaaaagatattcttaagctttgagttttttgcccggtggcgctgcgcttaccgggcctacgaaaacccgtcataccttgtaggccgggtaaggcgcagccgccacccggctaaagatcccccaacaagtgctccaccagcagcggaatcggtcttcccgatgccacgcttctgccgttctcacgccacagcgccgtcccgctgatatccagatgcgcccacggaatggtcggcgggcagaagtgatgcagcagccacgccgccgaggcgctgatcgccgcattgttggtcggcgtgttgcatagatcggcaatggcgctgtcggtctgctttctcagccgcgcatccagcggcagggaccacacctcgtcgccgcttcgtttgcccgcgagcgtcagtgcctgacgcaacggctcatcctgggtcatcagcccgctcagctcataccccagcgctttcaccaccgctccggttaaggtcgccatatcaatgatatagtgcgcctgcggatggcgctgactcgcccaggcgatagcgtctgccagtaccagccggccctcggcatcggtattgttgatttcaacggtggtgccgttgcaggccgtcgccaccgtgccgggctgcatggcgtcggggccgatggcgttttccgccagcgccagcacgcccatgatgcgcacgggtaatttcagctccgcaacggtcagcatcagcccgagcacgttagccgcgccgcacatgtcatatttcatggtgtacatgcccgcgccttccttcagccacaggccgccggtgtcaaaggtaatgccttttcccacgtagcagcgcaccgggccatcagacacgccgttatagtgaatagccagcaggcgcggtgggcaggtcgcccctttgccgacggcgtgcagcaacctaagcccttgctcaacgatttgcgtttcatccaacacctcgcagcgcagggcagggctggcggcacacagtttttgcgcctcatccaccacaaactgcggcgtgcagcggtcggacggcatatccgccagacgtcgcgccgcaaccatgccgagcgcaatggcctgctgctggcggaaggtcgtctccagcttcgcctgctgttccggcaggcagagggcagtgatgcaggtaagacgcagcgctacgtccgtcttcttcagcttcaggtcactgagcctgtgcgcctgattaaagagaaaacgcagtacctgcgccagcaccacatcgtcaatatccgtcacgtccagcacgagttcggcgctggcgggggcggcaagcagcggtcgcagggcggtgagcaacccttcggtcagggcgtcatgccagagcgcatccggaaacagggtgatgcgggcaaacggcgcgcagccaaagcgcgcgtccgcgacggtgctctgctggcgcatttcagcgacaagagcgctttccggtatcagggaactgtcagcgcgcgcaatcaaatggctttgcggcttcgcgtctgaaagcgcgttgataaactggtatgtgatcatcatgactcctcaatcggtgcgcggatccgcgcggcataggcctgcatccactcctcatctaccgcgtgatagtgcgttttctcccgcaggcgttcagtacggaaaacggtgaggggctggcgagccgtcgccaccacaaacgagaaggttttgatgttggttgcggcgccaaattctcctttgctgttcatgcacaccacggagagatcgcccgcgcgaccgaagcgcgacatcagcttgtcttccagttcgaacaccaccgaatccgccgcctgctgcggcgtcatcccttgcgccatccggcgaacgatttcgtagctggtacagcccttcatcagatcttcaccgacgcccgtggcggtggccgcgccggtttcgctgtcgcagtaaaagccggagccgatgatgggtgagtcaccgaggcgaccgcgttttttcataaacaggccgctggtggaggtggcgacgctcatcgagccctgtttatcgaggccgatgatgccgacggtgtcatgtccgtcgtaggggcttaaccccttgtccagcgtttcgcggcagcgcttacggtagtgttgcatggcgcgatccgtgagcatggttttgtcggcaaagccctggctcagcgcccattcgcgcgcgccctggccgaccagcaggctgttatagcgctggcggctgagcgcgtgcgccacgcgtaccgggttggcgatatccaccagattgcccacggcgccgaacgccagcgtgtcgccgtccatataggccgcgtccagctctacctcgccgttctcggtcggcagcccgccgtagccgacggatttataaaacggaaagtcctccacggcggcgacggcatcgactaccgccgcagcgaccggtttcccggccgccagggcagacgcagattccgttaccccttcaagcgccattcgccaggttgcgataattccccacatgctttactcctgttttgcaagggtggtgtcggtttgcgtagcggtagtcagctccgcggcgcggtactgtttatccacgatacgcatgaaaggcaggtacagcatggcgccaatcagcaggttgatcagctgcatcacgctgccgctcaggtgcccggtgacgataaagccgctgataaccggcggcagcgtccaggggataaacaccccggtggtgacggcgaccgcaccaattttcatcgccgcatactgcacggtgaccagcaccagcggcaccagattgaacgggatgagcatgatcgggttcatgatcaccggcaggccaaagagaatcggttcgttgatgttaaacaccgacgcgcccgcaccgaggcgtgctacttcgcgcatgtttttgctgcgggcgaaaatcagcatcgcaatcaccagcgacagcgtggcgcccgcgccgcccatccagatcatgtcaaaaaactgttcggtgatgatgtgcggcggcgtcgttcccgcctggatcgcggcgatgttgtcggtctggttctccatccacagcgggcgaataatcccgttgatcatcgaaccggagttaatgcccactgaccacagaatggtgatgctgaatacggtcatcagcgccccgaaataagaggtgccgtagtggcgcaccggggtggcaaccacttcataaataaactggtggatggtgtgatagtgggtgttttcaaagatgatgcggataagcagcaccagaatcatcaccagcagggccgggatcagggccgcgaacgactcctgcaccgccggaggcacgccgtccggcattttgatgaccagctttttgcgcttcagccagcagaacagttccgtccacagcagggaaccgatcatcgccacgaacagccctttgctgccaatccactccaccggcatcacggtaatgccgccgttttccgccactttgataaagggcgtcaggatcagaaacgcgaccagcgccaggatgccgcaggagatgcggtcctcgccataatgctcagccaggcggtaggccaccaggaagctgataaacagcgacatggttgagaacaccgcgttaaacgggatctctataattgcactccagctctcaccaaaggcctgagacataaactgctgataggcctgattcgggaaggaggagatcaccagcagaatggagccgacgatgataaacggcatgaatgaaacgtaggcgccgcgaatggccccaagatgacgctgctgggccgttttcgccgccagaggcatcagttttgcttcaagaaatcccagaacattgttcattgtgaactccgtacaagattgaggggtgttgtttatgttatgtctgtggattatcagtgaagcgcggcgagcgaaaggtgaaatcggtcacaaagcattcgctgctctgatataaatctcataagattagttgcggagagagacgcgatggaaatcaaactgcatgccaacgccaccaccacgccgcgtatccgtcgctatcttcagcagtcagataaaagtgacagagagcttgccgttgagctgggtatctcggtcactaccgtcaggcgctggcgcaaccgcgaccaggtttcggataaccacaccacgccaaaagtgatacacaaagcgttgagacaagagcaggcgacactgataaatgccctgcgggatatcaccggggcaccgctggatgaactgctgctgctggtgaatgacggactcgggatcgccgtttcccgcgccaccctgaaccgctacctcaaaccagcttcggtaaaacaaaagggggcgtcgttgcagggcaaaaaggcgctgaaggccgggatcatgccgcagaagctactcctgcatcatcagccgctgtcgctgcatatggacgacggtggcgagcaacacctgctctgggcgcgtgaacccgtcagcggctggtgttacgcccgcctttatgccggtgtctcgccgcagttgctgacccgctggacgaacgaggtgctggctgcctgtccggctgatattcaatctgttgagacttttgggctggaagtgaacttgccggagcataacgtcaccgtaaaagtgcattcacagtattatctcgcccttcaggtcacggtgccgttacgcgaaatcattccgcgggtgaatagtgaaccggcgggagagctgttgatccaactgtgtgagttttacaaccggggaaaagcgcagaaaaagctgggagagcgtacgccgcaggcgtttctggaagcgctgcggcgtaacgattagacgatctcgagcacgtcttccggcggacggccgatacgcgccttgccatttgccaccacaatcgggcgctcaatcagctttggattgtcgaccatcgcctgaatcagccgatcttcagtgagagtggtatcgttcagattgagcgacttatacagatcttctttctgacgcatcaggtcgcgtgcgctgcccatgttcagcatcttcagcagctggcggatagtctgcgcgtccggcggcgtctccaggtacagcaccacttccggttcgatgccgttagacttcagcaggctgagggtgtctcggctcttggagcagcgagggttatggtaaatttttaccgcgtctgtcatgacttctcctttattacatcttctcgtacggcttaaagcgttgttgcaggccgcgcagctggtcgattcgcgcatcgtagcgggcctgttgcaggctgccaagcttcacctgcgagctggcgctgctcagcagggaaatggcctgatcgagacgacccgccagcgccagaccttccgcacgcgcggccagctcctgatcgcggttacccagttgcccctgggcctgggcgagcagctcccagccgttctggtcatctttattgttaaaggtgtagcggttcagaatggtcaccgcctcgccgggctggccgccctgtaggtaggcgttcgccaggttaagctgcaatactggattattacgaagatctttcgcccctttcaggcgattaatcgcatcggtcgcttttttctgccccagatcgatatcggtggcgaggtcgagataccacggattgtcaggcgccgccgccagcagcggctgtagcgcttttcgcgcttcatcgtatttgctggcctccatcgcctggagcgcctgaccatactgcgccgcgtttttctcgcgcacgttgcctttcgccagcgcgtccagcagatcgctggtgagctgattacgtccggagttgtacatgccaagcgttctcactttggccatgtagaaatcctgcgaagactgcaccacgaccggacgcatctggttggcacggttacgcgcatccgagaggcggctttccggcagcgggtgggtcaacagaatttcaggcgggcgcgacgagtagcgtgcctggtcgagcagtttttccaggaagctcggcatggcctgcgggtcaaagccggaacgctgtaaaacctgaatgccgatgcggtctgcttcctgctcattctgctgggtaaagctgatcatcccctgacgcgtccccgccagcgtcccggtaagcgccgccatcccggcctgcgggctggccatcgccagcagaatagagcccagcgcgcccacccaggttagcggggcgttacgcttctgatcttccatcgcacgcgccagatggcgctgggtgacgtgcgaaatttcgtgcgccatgacggacgccagctggctttcgttatcggaataacggaacaacgccgaatgcagcaccacgttcccgccaaagaaagcgaaggcgttgatttcgtcgttattgattaaatagaagtggaagggcgtttttaccgagtcggcgtgcgccaccagacgcatccccaggccgttaatgtattgcaccagcaaagggtcgttaatcagcggagcactgccgcgcaactggcgtacgtaataatcacccatctgcatctcctgcccgatggagagcgtgcttcctgccgtggtgcccatgtccggcaatgaatcggacgagtcagcgaaagcgggcaacacctgacccaccgtcacggcggcaatcagtgtcgcaaccagtgtttttctcaactgcctgaacataaccactgtcctgtatgttggatgtgctaatttgaccgatgaacccgcataacgttcatctccgctgctctgcgagtgtagccgtgttaagagatgaagaaaatcccattcatcagggttttgcgaaacctgacagtgaaacaaaaaggaaagtcttttttgtgacagttagatacaattcaccgtctcactcccgccattcgattcagggaagggttgtatgctcgaaatgttaatgcagtggtatcggcgtcggtttagcgacccggaagccattgctttgctggtcattctggttgccggattcggtatcctgttcttctttagtggcctgctggcgccgctactggtggcgattgtgctggcgtatctgctggagtggcccaccgcgcgtctggaacatatcggctgttcccgccgctgggcgaccagcattgttctggtgctgtttgtcggcattctgctgctgatgtccttcgtggtgatgcccatcgcctggcaacaggggatctacctgatccgcgatatgcccggcatgctgaataaactgtctgattttgccgccacgctgccgcgccgctatcctgcgctgatggacgccgggatcatcgatgcgatggccgaaaacatgcgcgcccgcatcatgaccatgggtgactcggtggtgaaatactctctggcctcgctggtaggcctgctgacgctggcggtttaccttgttctcgtgccgctaatggtgttcttcctggtcaaagataaagagcagatgctgaacgcggtgcgccgcgtgctgccgcgcaatcgcggtctcgccggtcaggtctggcaggagatgaaccagcagatcaccaactacattcgcggcaaagtgctggagatgattgtggtgggcgtggcgacctggattggcttcgtgatcttcggactgaactactcgctgctgctggcggtgctggtcggattctcggttctgatcccgtatatcggcgcgtttgtggtgaccattccggtagtcggtgtggcgctgttccagtttggtctgggtacggagttctggagctgtttcgccgtatacctgattattcagggactggacgggaacctgctggtaccggtgctgttctcagaagcagttaacctgcatccgctggtgattatcctgtcagtggtgattttcggcgggctgtggggattctggggggtattcttcgccattccgctggcgacgctgattaaagccgtggtccacgcgtggccggacgtgccagcggtggaagagaagtagatttagtgcgggctgatgccctcaccccaaccctctcccgcgggagagggggcaaacactaaaaacggtagcgcatgctaccgttttgcatttaccttgtagcccgggtaagcgcagcgccacccggcactaaaatgatcacgcgttctctttcagccacttcaacaccacgtcgtggtggttgctggttttgaaatcatcaaacacgtgctcaactttaccgtcagcgtcaatcaggaaactgatgcggtgaataccgtcgtacgttttgcccataaaggacttctcaccccagacgccaaactgctcgcaaacctggtggtcttcatcggaaagcagcgtgaagttcagcagctctttttccgcaaagcgtgacagcttctctggcttatcggtgctgatgcccagcacttccacaccgacctttttcaactcatccatgttgtcgcgtagaccgcaggcctgtacggtacagcccggggtcatggctttcgggtagaaatagaccagaacacgctgtccctggaagtcggtcaaatttacttgctcgccgtcttgatccggtaagctaaatttcggtgcgatatcaccggctttcagtgggttcattactcaactccatcctgttcgtgctgcgaataatcgacgacgcttatactgccttgcgcgtgtaattctgtacagagggctttgaacgcttgctcgatatttgacgcatcctgcgaggcagggctgtgtgcggtaatttgaataaacagcgtcgggattgcgttttcatcgcccggctgcgtgcgggaaaccagttcggcaatgttcatctgatggctgtcaaacagcgccgtaaaacgttcaatcagatgaggtgaatcaggcacttcaacctgtacccagaccgtggcaggcagagccggacgcgggcgcgcggtggtgcgcttcatcacaatcagtaaatccagctctgcgcctttcagcggcagggtagattcgatgagggtaatggcattccatgttccggaaagcagcatgatgaacgtgaactcttcgccaagcatagccagccggctatcttcgatgttgcagccgcagctgctcacgtggcgagtgatggtattcacgatacccggcctgtcagcacccagcgcagtgataaccaggtaatgttgtgatgaggttgtcaaacctgttcttcctttgcgtggttaagtcttcctaaggaaagcataaaaaaaacatgcatacaaccgcctgagagcctcaggtcgcttgcttttattacagttccaaacgtaacattgaggctcttgttcgcacagaggatggctcatgttcacgggaagtattgtcgcgcttgttacaccgatggatgaaaaaggtaatgtctgccggtcaagcatgaagaagctcattgattaccatgtcgccaatggaacctcggcgatcgtttcggtagggactaccggtgaatccgctacgctgagccacgaagagcacggcgacgttgtgatgctgaccctggaaatggcggacgggcgtattccggtcatcgcggggacgggcgcaaacgcaacggcagaagcgattagcctgactcagcgttttaacgacagcggcattgtcggctgcctgacggtgaccccttattacaaccgtcctactcaggaaggtttgttccagcatttcaaagccatcgctgaacatactgacttgccacaaattctgtataatgtgccgtcccgtaccggttgcgatatgctgccggaaaccgttggccgtctctcgaaagtaaaaaatattatcgggattaaagaggcgacagggaacttaagccgcgttcatcagatcaaagagctggtttcagacgactttatcctgttgagcggtgatgatgcgaccgcgctggactttatgcagctcggtggtaatggcgtgatttccgttacggcgaacgtggcggcgcgtgatatggctgacatgtgcaaactggccgcagccggtcactttgatgaagctcgcgtgattaatcagcgtctgatgccgttgcacaataaattatttgtcgaacccaatccgatcccagtgaaatgggcatgtaaggagttggggcttgtagcaaccgacacgctgcgtctgccaatgacaccgattaccgaccacggtcgtgaaattgtcgctggcgcgctgaagcatgccggtttgctgtaaagtttagggagatttgatggcttattcagtacagaagtcgcgcctggcgaaggttgcgggtgtttcgcttgttatgctcctcgctgcctgtagttcagactcgcgctacaagcgccaggtgagcggtgatgaatcctatctggatgcgccgccgcttgctgaacttcacgcgcctgccggcatgatcctgccgatccagaacggtgattataatattccggttaccaacggcagtggcctggtgggtaaagcgcttgatattcgtccgccggctcagcctctggcgctggtgagtggcgcgcgcacgcagtttaccggtgatacggcctctctgctggtggaaagcgcacgcggtaccacgctgtggccgcaggttgtgagcgttattcagtcgaaaaactatacgattgataaacgcgacgacgccagccagactttaaccaccgactggattgagtggaaccgtctcgatgaagaccagcagtatcgtggtcgttatcaagtctccgttaagccgcagggttatcagcaggcggttaccgttaagctgttgaatcttgagcaggcaggtaaaccggttgccgatccggccgccatgcagcgctacagcactgaaatgctgaacgtgattgccgcaggtctggataaaaacgctaccgatgccgcaaacgccgcgcagaaccgtaacggttcaacgtttgatgtgcagagcggtgcagacgataccggcctgccaatgctggtggtgcgtgcgccgtttaaccagacctggcagcgcctgccagcaacgcttgaaaaagtgggcatgaaggtgaccgacagcacccgttcaacgggcagcatcacagcgacctataagccgctgtctgatagcgcctggcaggagctgggggcaagcgatccacagctgccttccggtgactacaaaatccaggttggcgacctcgataaccgcagcagcctgcaatttatcgatccgaaaggacacacgctgacccaggcgcagaacgatgcgctggtcgctgccttccaggccgcattcagcaaataatagtgagggctggttaatccagccctttttattttcgtgctacgcaaacgtgtgcgtggcataatatggccagttttgaatacaaatcatcacaccaggagtaatgaagatgcagaagcaagctgagttgtatcgtggcaaagcgaaaaccgtatacagcacggaaaacccggatctgttggtgctcgaattccgcaatgatacgtcagcaggagacggcgcacgcattgagcagttcgatcgtaagggcatggtgaacaacaagttcaaccacttcattatgaccaaactggccgaagccggtatcccgactcagatggaagcgttgctgtccgatacggaatgtctggtaaaaaaactggatatggtgccggttgagtgcgtgatccgtaaccgtgccgcaggctccctggtgaagcgtctgggcattgaagagggtatcgaactgaatccaccgctgttcgatctgttcctgaaaaacgacgccatgcacgacccgatggtcaacgaatcctactgcgaaaccttcggctgggtaagcaaagagaacctggcgcgcatgcaggaactgacctacaaagccaatgacgtgctgaaaaagctgtttgatgacgcgggcctgatcctggtcgacttcaagctggagttcggtctgtacaagggcgaagtggtgctgggcgacgaattctcgccggacggcagccgcctgtgggacaaagagacgctggataaaatggacaaagaccgtttccgccagagtctgggtggcgtggtcgaagcgtacgaagcggttgctcaccgtttaggcgttaagctcgactaaactgcgcatttgccaaaggatgttggcatcctttggcgtcttatccttgtttactatggtaatcctttcattaaccgcctacgatcatagctattataaatggaatagttcgaggtgtttatgcgctggcaagggcgtcgtgaaagtgacaacgtagaagacagacgcagcagtggtggcggtggtccgtctatgggcgggccaggtttccggttacccagcggcaagggcggcattattctgctggtcgtcgtgctggtggcgggctactacggcgtcgacctgaccggtttgatgaccggtgaaaccgggcaacagcagcagtattctcagcgctccatcagcccgaatgaagatgaagcggcgaaatttacttccgttattctcgcgacgaccgaagatacctggggtcagcagttcgagaaaatgggacggacttatcagccgccaaaactggtgatgtaccggggcgcaacccgcaccggctgcggcaccgggcagtccgttatggggccgttctactgcccggcggacagcaccgtctatatcgatctctccttctatgacgacatgaaaagcaagctgggcgccgacggcgattttgcccagggctacgtgatcgcgcatgaagtcggccaccacgtgcagaagctcctcggtattgagcctaaagtgcgtcagatgcagcagaatgcttctcaggcggaggtgaatcgtctgtccgtacgcatggagcttcaggccgactgcttcgctggcgtctggggacacagcatgcagcagcagggcgtgctggaaacaggcgatctggaagaggccctgaatgccgcacaggcgattggtgacgatcgcttgcagcagcagagccaggggcgcgttgtgccggacagctttacccatggcacctcagagcagcgctacagctggtttaagcgtggcttcgacagcggcaacccgtcgcagtgtaataccttcggcaaagctatgtgatgttggggtttgaacagctggtcaaccagcttcagcgtaccgggcaccgccggctggtggtgctcagcggcgatgaagcgtggacgttaagccaggcgaccattctgcgcgatacgttaccaggagactggctgtggctggaggaaaacccctctaagaccatcagcggcctgctgggacgtgaatacctgcacgccgtttttgacgcgcgtcgcgggtttgacgtctcggccttcgccgccctcagcgggaccctgcgcgccggaagccttctgattctgctggtgccgccgttctccgtctgggctaacaggcccgacgcggattctctacgctggagcgacagcgccgagccgatcgccaccccgcactttgttcaccacttttgccggacgcttgccgccgattcagatgccatcgtctggcatcaacatcgtcctctgtgccttcccgttacgccagatttacccgcctggcagcctgccagcggtgaaccgcagcgcgagcaagctgagatcctcgacgctcttctgaccatgcctgcgggcgtggccgccgtgacggcaccgcgcggacgcggaaagtccgccctggcgggcatgttgctcaacggcattcaggggagtgcagtagtgacggcaccggcaaaaggggcgacggatgtcatcgcgcgtttcgccggggaacattttcactttatggccccggatgcgctgctcgcctccacaacagaagctgactggctgattgtcgatgaggcagccgccatccccggcccgctgctggagaagctggcgtcgcgctttccccgcgtgttgctgaccaccacggtgcagggttatgaaggcacgggcaggggattcctgctgaagttctgcgcccggtttagcgggttgcggcgatataccttatccacgccagttcgctgggctgccggatgtccccttgagcggatagtggcgaacgcgctgctgttcgacgatgcgcttatcgatcacaaaccggaaggcgaggtacgtttaacgtcgctggagcccgggatgtgggagagcgatccgacgcgcggggcaggcgtgtatgaactgctttgcgccgcgcactaccggacgtcacccctcgatttacgccggatgatggacgcccccggccagcactttgctgttgctcaggcgggcgcggagatcgcgggcgcgctctggctggtggaggaggggggattaccccctgaacttagccgcgcagtctgggcgggctttcgtcggccgcgtggaaatctggtggcgcagtcgctggcagcgcacggcggctcgccgctcgcggcgacgctgaaaggccgacgcgtcagccgcattgcggttcatccccatcgccagcgggaaggcatcggccagcggctgatccgcagtgccagcggagaagattatctctcggtcagctttggctataccgacgagctgtggcgtttctggcggcagtgcgggtttgtgctggtgcgaatgggcagccaccgggaagccagcagcgggtgctatacggcgatggcgttgctgccgctgagcgaggcggggcatcagctctgcgaacaggcgcatcagcggttatgtcgtgatatgcgcgtcctgtcggcctggaatggcgaaaagatcccggtgacggatgcatgggaagctacccttaatagtgacgactggctggagctggcggggtttgcctttgctcaccgggcgttttcaacttcggttgcggcgctgacgcggttgttgttagccgtggacatgccgctcccggcactgcgggggaaaatggaagggaatatgcacgatttcgggcgcaaagcgttgctggcgaagctacgcgaggaaaccgctcacgcgcttgaaaggcttgattactcccgtagccagcagctgaaagccgacattttgcaatggcaattttttcaatgagttcttcagtaaagtggcatggtcattaccccgcagaggcgtaaaatcctgcttatcaattaaggagatcgccatgaaacatgaccattttgttgtgcaaagcccggatacacctgctaaacagctcctgcttctgtttcatggcgtgggcgacaatgccgtcaatatgggacaaattggcagctggtttgcacccgttttcccacacgcgctgatcgtcagcatcggcggcgtggagccgtgcggtccggacgggcggcagtggttttccgtcgagggcgtgacggaggagaatcgtcaggcgcgtattgatgccgttatgccggcctttatcgataccgtgcgttactggcagcagcagagcggcgtaggcgccgacgcaacggcgctgattggcttctctcagggctcaatcatgtcgctggaaagcgtaaaagcgcagcccggactggtgtcccgcgtgattgcctttaacgggcgttttgcgacgttaccgcaaagcgcgaccacgcagaccacgatccatctcattcatgggggggaagaccgggtaattgagctttcgcatgcggttgctgcccaggagacgctgatgcgcgagggcggagatgtgacgctggatatcgtagacgatctggggcatgccattgacgatcgcagcatgcagttcgcgctcgatcatctgcgttataccgtaccgaagcactactttgatgaagcgctcagcggcggtaagccgaatgacgatgatatcgtcgagtttatgtgaggtgtccccctctctttagggagaggggaaacagggcgattacttcttctggtccttcttcggccagtcgtcttcatcgtcccacttgtcgttaaaatcacggtgcggcggaagatccggtttgttggcaaggaactttttgtggtcaacgcgcttgagatctttaatcacgttaagcagcacgcctaccagaaataccaacaccagaatccaccagtactttgaaagccagtccattcgctaatcctctttaagcacccgtcaggcgacgagctgctccataatacgttgatacatgcgggccagcagttgtaaatcggcagcgttcacgcattcattgattttgtgaatcgtcgcgttaaccggacccagttcgacaacctgtgcgcccatgcgggcgataaagcgtccgtcagacgtgccgcccgttgtcagcagttgtggcttaatttcattatagtgcgcaatggcgttcaccaccgcatccaccagtttaccgcgctgcgtcaggaacggctggccagacagccaccagtcgagggtatagcgcagctgatatttctcgagcagcgcaatcacgcgcgcttttatcatctcgtcggtcagttcggtgctgaagcggaagttaaactggacgaagagatcgccgggaatgacgttgttgctgccggtgccggccttgatgttggctatctgcatgctggttggcgggaaaaattcgttgcctttatcccattcaatgcctaccagttcgttcagcatcggcgcggcgcggtgtaccgggttatccgccaggtgcggataggcaacgtggccctgcacgccatgaatagtcaaattacaggtcagggatccacggcggccatttttcaccacatcgcccaccacttcggtgctggacggttcgcccaccagacagtagtccagacgttcattgcgcgccatcagcgcctcaacgaccttcacggtgccgttgtgggcgctggcttcttcatcggaggtaatcaaaaacgcaagacggtttttatggttcggatgctgggcgacgaaacgctctgccgccacgaccatcgcagccagagaacctttcatgtccgcagcgccgcgtccgaaaagcatgccgtcgcggatggtcggctcaaaaggcgggttgatccagcggtctgcgtcgcctgcgggaactacgtcagtatgtccggcaaatgccagcgtctctccctgaccgcgccatgcccagaagttctgcgtatcgccaaaatccatgtgctccacggtaaaaccgatggcacgcaggcgctcaatcattaatgcctgacaacctgcgtcgtccgggctaagggaaggacggcgaataagctgctgagtcagctcaatgaccgggcatgacatagactacacctcaacgaataaatctgaataaagggtttcactgaaacccagcagcataggctgacctggcttgcagagcaatgggcgtttgatgattgccggcatttcaagcatcagtttggctgcgctgtcggcgtcgttgatcgtggcccggagagattcatccagttttcgccaggtggtcccgcgtgtattcagtagcgcttcccatcccagttcgttgatggcggaatggaggaatgcggggtcaagcccgtcggcacggtaatcgtggaagcgatagtcgatgttgtgtgcttccagccagcggcgggcttttttaatcgtgtcgcaattcttaatgccgtacatcacaaccatagtgaatccttttgttcttttgtggattaaatgttcaatattttcgaagatatatccttaagtggaatataacacattcggaatttttcgggatttacaattctccataattcaacgaacagctgtaagctgaatagtctttcatcttttaagcatagttgtccaccctgtttaaattgccaataaactcagggggaaattaaaaatgctgtcatttttccgactatttcaaaatattgctgtaggtcacataaaatttacccgacaacgctcatagtgatcctaaacctaccagcacagcggggctcaatcacagcaatcggttaaagtggcttcacaatgatgatacgttttcgtagaatgcgcataataataagagaggttgttatgattgaacgtgaactggggaactggaaagattttatcgaaggcatgcttcgtaaatgaatttccggtaagaaatgcaagagcacttaattaactaaaataaccatagtgtgaaagaatcacacaataaaaaggcggcctgtaaagccgccttttttatttcaacgtgttattccggcttatccttcagcgggaaacgacggcgtaccagcacaaagaacagcggtacgaaatagatagccagaatcgtcgccgaaatcattccccccataacgcccgttcccaccgcgtgctggctgctggagcctgcgccggagctggtggccatcggcaggacgccaaacacaaacgccagagaagtcatcaggatcgggcgcaggcgctgacgacaggcgtgcagcgtggcgaccatcagttcgtgacctttggcattcatctcattggcaaattcgacgatcagaatggcgtttttcgccgacaatccgattacggtgaggagtccgacctggaaatagacatcattttccaggccgcgcatccaggttgccagcagcgctccgatgaccccgagaggcaccaccagcatcaccgagaacggcactgaccagctttcatacagcgccgccagacagaggaacaccaccagcagcgaaagggcatacagggcaggcgcctgagcgccggaaagccgttcctggtaggacatcgccgtccactccaggccaaagccggtcggtaactgctgaaccagtttttccataatgtccattgcggtaccggtactgacgcccggcgcggcttcaccaacaatctccagcgccgaatagccgttgtaacgctccagacgcggtgaaccggtctcccagcgtgacgtcgcaaatgccgagaacggcaccatgccgccggtgttattgcgcacataccagcggttgatatcgtccggcagcatgcggtatttggcggcagactgaacatagaccttcttcacgcggccgcgatccataaagtcattcacgtagcttgagccccatgccgtttgcagggtgtcgttaatgtcgtcgatggagacgcccagcgcctgcgctttacgctggtcaatatccacctgtagctgaggactgtcatccagaccgttatgacgaacgcgggtaagctgcggatctttcccggccagctccagcagcttgtcgcgagcagccatcaacgcgtcatgcccggcgcccgcgtgatcctgaagctccatatcaaacccggctgagctgcccaggccgctgatggcgggcgggctgctggcgaaaacgcgcgcttccttgattttgttgaacgctttggttgcacgctcaatgatggcaaaggaggagccggtatcgctgtcgcgctggtcccagtctttcaggcgcacaaacatacgcgccacgttctgcccgttaccgccagggccagagccgacggtggagaagacggagaccacgttatctttctcctgagtatggaagtagttctcaaccttctgcaccactttcagggtcgtgctgctgggtcgagccgctcggtaactgtacggaggtgataaacatgccgcgatcttccagcggcaggaacgaggttggcagccgcaggaacaggaagaccatgccgccgagcagcaggacataaaccaccatccagcgcacgctgcggtgcagtactttacccacgcccgcttcatagcgcgccgcattgcggttaaacatgcggttaaaccagccgaagaagcctttttgaccgtggtgttcgcccttatgcagcggtttcagcagcgtcgcgcacagggcaggggtaaggatcatcgccaccagtacggagagcaccattgcagagacgatggtgatcgagaactggcgataaatcgcgcccgtggtgccgccaaaaaacgccatcgggataaataccgccgacagcaccatggcgataccgaccagcgcgccctgaatctgtcccatcgatttgcgcgtggcctcgcggggcgaaagcccttcctcgctcatgatgcgctcaacgttttccaccaccacgatggcatcatccaccagcagaccgatggccagcaccatggcgaacatggtcagggtgttgatgctgtaaccgaaggcatacagcaccgcaaaggtacccagcagcaccaccggcaccgcaatcgtggggatcagcgtagcgcggaagttttgcaggaacaggtacatcacgaggaacaccagcgcgatagcttcgagcagggttttcaccacatcttcgatggaggcttttacgaacgaggtggtttcgtaggcgactttgtactccagtccgtgcgggaagaaatgcgacagctcatccagccgctccaacacccgctgcgcggtcgccatttcgttggcgccggaggccagtttcacccccagcccggacgcggcattgccgttaaagcggctcaggtagtcatatttttccgcccccatttccacggtggcgacatcccccagacgcacttccgaaccgtcctgattcacgcgtagcgtgatattgcggaactgttcaggtgtctggagcagcgactgggagttgatggtggcgttaagcgcctggttatccacggacggggtaccgccgagctgccccacggcaatctgggcgttctgcgattcgatagcgtcggtgacatctttggcggtcatctgcacgctgttcagcttgttgggatccagccagatacgcatggagtactgcgagccgtaggcgtcgatatcacccacgccgttgatacggctgagcgggtcctgaatattactggcgacgtagtccgcgatgtcctgcttatccattgagccatcggttgaaacaaacgcgatggtcaaaatattggtgtcaccggttttacgcacggtcaccccctggttctgcaccgcctgaggcagtttacgcagggccgattgcagctggttttgcacctgctgcaccgcttcatccggatccgtgcccgccgtaaagctcagggttaccgtcgcctggcccgtggcgctgctctgtgaggacatgtacatcaggttatcgagacccgtcatgttctgctcgataacctgggtgacggtattttccagcgtctgtgccgaggcgccagggtagttcgccgtgatacgcacgttggggggcgcgaggtcagggtattgctcaacaggaagggacgtaatcgccaggacacccgtcagacacaacaggattgcaagcacccaggcaaaaatggggcgatcgatgaaaaaattcgccattaaagtgtgacctcgttttgctgcacgtcattattgtttattgcccgcctaactttagcggtaaggcccaggtcaaacgtggagaaataaaggagataatgtaaattatcatgcgcttttttcagcgcgccttctttctcgctattttttagcctgggccgcaggcgtctggaacgttacgctgacctgtgtcccgccctgtggcggctgagaaaagtgtaatgtcccgccgagccgtcccgcgcgttcgcgcatgatattcagcccgtaatgccccggcggttcactggcgtcgccgataccaatgccgttgtcgcggatcgtgaccgtgtgagtgccgtccgcggtggtgacgcagctgaccacaatctcgctcgcgtcggcatgtttaatcgcattcagcactgcctcacgcacaatctgtaagaggtgcacctgtttttgtgcgtccagcgccagcgatgagagacggcagtcgagcaccagcttcgcgcgggtctggctttgcaacccgtcgagagactcctgtagcgcggcaggaagattggcgtgattgagcgtcaggcggaaggtggtgagcagctcgcgtagctgatgccaggcattattcagctcgcgggagaagtccgtaatgatggtctgcgccggagcattgtcgcccggcacggcatgcttcagcagcgtaagctgaatacgcaaataggagagcacctgcgccagcgaatcatgcagctcgcgcgcgatggtggcgcgctcctccatcagcagcaactgctgataatgtttctgcgcctgattaaaatagagcccccggcccagcatcgtcgccacgctttccatgagcggcagcggaacatccccggtcgcgctttgccagcgcagttcgccgtacagggtgtcctgcattaacaccggtaaattgtgcattttctcgcccggggactcctgtccttcgtaaagctgccagtcgtcactggtgcgcaattgcaggtaattcatctgcgtatagtcatgcacaatctgcaaaatatgccggaagcagtggctgtctatctgcccggtattcaacgcctgtgagcatttaaacagcatttcgagctgctgatgcgcttcatttaggtggcgggttttttcagcaacggagcgctcaagtgaacggtacagggtgtgtaattccgccgacatatggttaaaggcgcgggaaagctggcccagctcgttgggaagcgtagtatccggcgcgggagtgtcgaattgcccctgttcgatacgctcgctcgccgccaccagattattcagcggcagcacaacctgacggcggatgcgccgcagggtcactaccgccagcagcaggatgcccaggccacccgtcagcgacatgaaaatcaccagctgaattttatgttcggtgtagtgctgtagcgccagcacaaaggcatctatccggcccacgaaatcctctatgtggttctgataccatccggtatcgccgctggcgatgcgcgtgtccatctcctgccagccaaggtgcaactgctggtaacgctgtttgacgtcctctggcacataccagcggtttagcttctgcaacgcaggcgcgctcagcgttttttgccagaccgcgcggtgctctgccagcgatgggccggcgcgctgcatttcgtagcccaggcggtagctctgcatacgcagcgagccggcgatgttaatcgcctcggcgtcgcgctggctgctggcgagtgtgaccagcgcaatggcgctgatcagaacggacaagacaatcatcgaaaagaaagcccgagccaggcttcccgatacggggcgtttaacggtcactcatcagcttcctgaattaaattgatctgccacaggttcactggaaatagttcggcttcctgggcatttgaacattgcgtcgccatgccgctgtgggtaaatacgataacaatagaaagaataaggttattgaaccaaaaacaggtgttgttatgaatcgttttattatggccaacgctcaacagtgtatcggttgtcgcgcctgcgaagttgcctgtgtgatggggcacaacggggaacagcacgcgctgagcgagcgccattttcatccccgcattacggtccttacttctggcttgcgaaaaagtcccgtgacctgccaccactgtgaaaatgcgccctgcgcgcaaagctgcccgaacggagccatcacgcaacacaacgacagcgtacaggtcaatcaacaaaaatgcattggctgtaaagcctgcgtggtggcctgtccgtttggcacgatggacatgctgatcgccccgctggaaaacgacagcgtaaaggcctcggcgcacaaatgcgacctctgcctggaaaggccgcaaggcccggcctgcgtggaaaactgcccggcggcggtgcttacgctcgccaccccagccgtactggataagctggttaaacagcgccgacagcgcagcgcaaggctggacgcgctgccgtggcacagcgaggcggttcagtcagtccctccgcaaaccaaacggcaacagatgcaaaacaccccggcgcgcggtgagccggataagctcagccccgaagcacgcgcataccattttaacgagatctacctgccgtttcgcccggaacaggcgcagcgagaggcatcccggnnnnnnnnnnnnnnnnnnnnnnnnnnnnnnnnnnnnnnnnnnnnnnnnnnnnnnnnnnnnnnnnnnnnnnnnnnnnnnnnnnnnnnnnnnnnnnnnnnnnnnnnnnnnnnnnnnnnnnnnnnnnnnnnnnnnnnnnnnnnnnnnnnnnnnnnnnnnnnnnnnnnnnnnnnnnnnnnnnnnnnnnnnnnnnnnnnnnnnnnnnnnnnnnnnnnnnnnnnnnnnnnnnnnnnnnnnnnnnnnnnnnnnnnnnnnnnnnnnnnnnnnnnnnnnnnnnnnnnnnnnnnnnnnnnnnnnnnnnnnnnnnnnnnnnnnnnnnnnnnnnnnnnnnnnnnnnnnnnnnnnnnnnnnnnnnnnnnnnnnnnnnnnnnnnnnnnnnnnnnnnnnnnnnnnnnnnnnnnnnnnnnnnnnnnnnnnnnnnnnnnnnnnnnnnnnnnnnnnnnnnnnnnnnnnnnnnnnnnnnnnnnnnnnnnnnnnnnnnnnnnnnnnnnnnnnnnnnnnnnnnnnnnnnnnnnnnnnnnnnnnnnnnnnnnnnnnnnnnnnnnnnnnnnnnnnnnnnnnnnnnnnnnnnnnnnnnnnnnnnnnnnnnnnnnnnnnnnnnnnnnnnnnnnnnnnnnnnnnnnnnnnnnnnnnnnnnnnnnnnnnnnnnnnnnnnnnnnnnnnnnnnnnnnnnnnnnnnnnnnnnnnnnnnnnnnnnnnnnnnnnnnnnnnnnnnnnnnnnnnnnnnnnnnnnnnnnnnnnnnnnnnnnnnnnnnnnnnnnnnnnnnnnnnnnnnnnnnnnnnnnnnnnnnnnnnnnnnnnnnnnnnnnnnnnnnnnnnnnnnnnnnnnnnnnnnnnnnnnnnnnnnnnnnnnnnnnnnnnnnnnnnnnnnnnnnnnnnnnnnnnnnnnnnnnnnnnnnnnnnnnnnnnnnnnnnnnnnnnnnnnnnnnnnnnnnnnnnnnnnnnnnnnnnnnnnnnnnnnnnnnnnnnnnnnnnnnnnnnnnnnnnnnnnnnnnnnnnnnnnnnnnnnnnnnnnnnnnnnnnnnnnnnnnnnnnnnnnnnnnnnnnnnnnnnnnnnnnnnnnnnnnnnnnnnnnnnnnnnnnnnnnnnnnnnnnnnnnnnnnnnnnnnnnnnnnnnnnnnnnnnnnnnnnnnnnnnnnnnnnnnnnnnnnnnnnnnnnnnnnnnnnnnnnnnnnnnnnnnnnnnnnnnnnnnnnnnnnnnnnnnnnaggggcggcggcgtcctgtcccggtggcgggcagtgagtttgtcatgccagcggatgcggtgatcatggcgtttggttttaatccgcacgccatgccgtggcttcaggcgcagggcgtcgacaccgacgactgggggcgcatcagggcctccgtggagagccgttatcgctaccagacctcgaatccgcagatttttgctggcggtgatgcggtacgcggtgcggatctggtggtcaccgcgatggcggaagggcgtcaagccgcgcaggggatcatggactggcttggcgtgccgccgcgcaaaatgcattaatgcagacgggcgacaaagcgggcttcacggcgtagtataaacagactcattttgccgtggagcccgtatgtccctgaacattaccgttattaaagacaaaatcctttctgaaaattactttgtcctgcgtaacatcacttacgatctcacccgtaagaacggggacgtcattcgccataaacgcgaagtctacgaccggggcaatggtgcaaccatcgtgctgtataaccgtgaaaagcaaagcgtggtgctgatccgccagtttcgcatcgcgacatgggtcaatggcaacgcggacggacgtctgattgaaacctgtgcaggtctgcttgatgacgatgagccggaagtgtgtatccgcaaagaagccattgaggagacgggttttgaagtgggtgcggtgcagaaagtctttgagctgtttatgtcccctggcggggttaccgagctggttcacttcttcattgcggaatataccgatgctcagcgcacgcaccggggcggcggcgtggacgatgaagacattgaagtgctggaaatgcctttcgctcaggctgtcgacatggtgaaacgcggcgagatccgcgacggtaaagcggtgatcctgttgcagtatctgcaaaccagcgggctgatgaatgcggcggcggaagcgcgataagttgtatttcagataaatctatccgataaatccgattgagccagcccgcccagggcacgaagatacgccccagattgacctattcgtttccggggctgtgccgttcatgcgctactgcgtttatcttctcttcttcatttgcgtgcttcccgcgcctttggtgtgggctgcgcctgcgcagcagtctttttcagactggcaggtgacctgcaataaccagaacttctgcgtagcgcgcaataccggcgagcatcgcggtctggtcatgacgctgagccgcagtgcgggggcaaaaacggacgccagcctgcgcatcgatctcggcgggctttcggcgcctccggtgaaagagcctgacatcgccccgcgcctgctgctcgacaatgtgccgcttaaactcacgtcgcaacactggcagttagccccctggcatcttaaaacagacgatacggccaccatcaccacgtttctgaaaaccattcaggaagggcaggcgctgaccctgcgcggggggaagcagacaatttctctggccggtctgaaagcggcgctgctgtttatcgatgcccagcaaaaacgcgtcggaagtgaaacggcgtggattaaaaaaggggatagtccaccgctgagcgtgccgcctgcgccggcattaaaaaaggtggcggtggtgaaccccacgccaacgccgctgacgcataacgaactcaacgatctgctggattacggtacctggcgcatgaaccacagccagtgctctctcgatccgaaccggcgtgaagtgcgcgtgaccgcgctgaccgatgacaaagcgctgatgatcatcagctgtgaggcgggggcgtacaacaccgtcgacctggcgtggctggtgtcgcgtaaaaaaccattttcggccaggagcgtgagattgcgtctgccgtttaccccttccagccagagtagcgacatggagctgatgaatgccagcttcgacgaaaaaacgcgcgagttgaccacgctggcgctgggacgcgggattggcgactgtgggatccagacccgctggcgttataacggccagcgcttccgcctggtacgctacgcggaagagccaagctgtgataactggaatgggccagatgcctggcccacgctgtggatcacaaggtagggttttgccgggtggcgctgtcgcttacccggcctactttttagaaccgtaggcccggtaaggcgtagccgccaccgggcacgagggcatcaccgatcgctcttacggaaaaagtcgttatacagcatatacaaatgcgccgcgctccaggagaagttaggtgcgccctgctgtgctccggtcagggggttatagttctcctgaatcgggccgtccgaggttaaccctttcgcatgcttaaagaaggtttcggcgagggtttgcgcctgctcacgatagccgtaacgttccataccttttagtccaaaccagaactgatcgacccagacccggccgcgccagtatatgtctgcgccgaacgccgggtttgtcagcgcggcggtgccgagcggtacccaggtattgaactccttcggatccagcatcaccttgaccacggcatccgcatgttcctgcgtcgcggcaccgttaaacagcggagaccagccttccggccctttaccacgctcgacgataggtttgcccgcacagccgttcgccagcggcttatcctcgatacgaatgtcatagtaaaacccgcttttcgcatcgaacatgcaggtgttgatataggttgcgagcttatctgccagctggcgatagtggctggcctcctgctctttacccagcaggctcgccatctgcgccagatagtgattgtcgctgtacatatagcttgcctggtcaacggactcctgtaataaggaataccctaacagatcgccttttttactcctgttttcggcaaatttaaccgtccagtcgctgcgttccccgccgttttcaacgtacttatccagctgcgctttatcgataaatccgaatacggcggcatcatcgcgcccggactcccacgaggcggccacctgcgcggggatctccaggctgtcgtactggccgttatcgattatccgtgcgtagttattcaggccggaaagcgactcttctttatcaccttttttcaccgtgaacagcatctcgccggtagcggtgttatgggccttatcacgcgtcgcaccgtactccggcacgccgttgccgttatgatcgcggttacgcagccaccagtcgtgataggcaaccagttttggatacatctcggcaagccaggctttatcctgcgtggtgttatacacctccatcaccgaccatgccgccaggctcggcttggtgttacgctcgttccagttaccgccgtcgccgcctcgttccgggctcaggttccaggcgattaaatccggcacaaatccggcatcctgcgggcgcaccggatcgtcgggtttgatctgccaggagaagaccgcgcggatgttatctttggcgatctccgggttgaaatgcgccatggcaaatgcctgtttccaggtgtcccacggccaggtctggttgccggagaaccagcgtccggttacggagggcgtcaccgtgttaaaacgcaccgcgccgcctggcgaacgccagttaccgttcaacgtctcgatggctttcaccgccacgcgcgtttgttctggagtcgcgtgcgggttggttaaccctttttgtaaatacctctcccagcgcgcttgcgaggcggccataaagtaggccggacgcgccagaatgtcgcggatctgcggctgttcacgcgcgacgtcatcggcgttcagcagatgggagtaggtagtgtacagcgtggtgctgccggaaatctgtgcccggctggtaaagcgatgtccgtcaacggtggtctcggcaggaagagagcggtgtaactgatattcggaactgccggaggtgagcagatcccaggtggagcgtaccttgccgaaggtcaccttcaggccgtcgcgcgtggctacaattttacgctgataatcaggatatgcgctgtcgatggttttatccgaacgcggcttgccctctttggcctccagtttttccagcagctcgccatcccacaccagctccagcggcgttttgctggtaatacgggtttcaagcagcgaagtacgcgcagaagcaaagcgcagcgtcatcacgatctgaacatccctggtgctcagtttctgcaccaacgcgccagggaggctgtaggcttcaagggtgaaatccacttttttgccgttctggtacacggacaggcgatcaaaattcgtcgccataaagttgatgtactcttcggtgagcagcgctacgccgggaaatccgccctgggtctgcggcccgtccggcagcaaatgcccatgccaggcacccatatcaaaaaagggattaaaccgctggtggtcgtcgtagtcgaaatcctgcatgaagagcggcgcgccggtacggttgatgacgtttttgaagtcagttgcggtggcggcgtgagccgaaaaactgagcgccagcgcgcatgccagcggcgtgaggacgtatttcatggtggtagatcctttttaccagtagaagtattgcatcaggaagacctgatcgctcgggtcgccggaggcatttttcatatagaagcggctgtcggcagcggtggcaaaacgcccgccgccgtactcgtaccagatcccgaactgcataaacgaggtagtttcttcagccgcatcgtccggacgatgtttcgcgtagctgtaagcagtggagagataaacgcctttcagggcttccaccatggcgctgaccataaatccgctctccgtgccggagacgttctgtccgtctgcccgtccggtatgatgccacgcgcgtgccgccaggttgggtgtcaaaacgcctgttaaaaagagctggcctgtaccgtcggtaatttcaagaccgttcatccaggtgacatctttcatgatgtcgtactgaatatagccattcgccattgccggataggtatatttgtcgtcataacgatcgtatttgccgaagtgcagccaggccttgctttcgtcatggtgtcccgctggcgtggcggtgacgctatagcgcaggttgccggagaggttttgcacctttagtgcgtacaagatgtcgcgggtgttggggatcacatagcccagatcaggcgtaaaatcgccccaccattgcaggtcatcgagagacgagtcctggcgcaggctgagcatgatctcggtgctgttatcggttttgtaaccgccgtagaagcggttaatcccaccttcaaacccgccccagctgtgatcgggcacccaggcgttgccctgatgatccgcctgtacggtccagccttcgccgtaaatcaggccgaaccagttcccctgtttcatctccagaccgccctcaatataagtgccgtcgctgtatttatgtttatcctgaccttctaaatccatatacccaccgacgcccatctcgccataaaaacgaaatgacggggaggttattgccggtgttttggtatcgtcatgttcagcgggccgggcatcttctgcggcaatagcagggcagcagaaagagagggcagcgagtgcccacaatgttttttgtttaattttcataaactcatcccaatgagataaaatccatgccttttatttcagttaatattcgaggcaggtgatgcttcaattttttgttgttcttttgataatccgtttacgtatttgctgtatttccaccaggcaaatccgaggaataaaacaatgccaccgacgttatagaaaataatcgtcagaatattggcaccggtagggaaagtggatgccacaaaaccaatggcgaaaataacaatcagcatcgacactatggttatacccgtggttcgtgaacccatcctgaaatcgcgcggcaggtgatcgagcttacgacgcaggttgaggtaggccagcataataaacagcggcggtaacattgaggctgctgcggtcatattgatgacggtgttcatcagctcctgcgcggtactggagcccatggtcgggataatcatcagtgggatcacaatcaaatactggatccaggccgcccgcgccggtacgccgttttcgttcagcgccacggttttcggaccaaaaatgccggtcgggatctccgagaaaaagattttgaccggcgtcgccgtccacatcagcagggagccgaacatggcggtaaaggaaaccagaccgacgaaacggttcataagcacttccggcaggccaaaccacaccgccagaccgtggaacacctgcaccgaacccccggtaaacttcaacgctttgctgctgataaagacgttgatcagtaccgaggagatggagtacagcacgccgataaagatccccgccaggatgatcactttaacgaaagatttcgaaccgcctttcacatcgtttacgtacaccgcgacggattccgcgcccccggcagccataaatatccaggtggtaatgccgaggaatgcccagttaaaatgcgggatcatcgcgtcgacggtaatcggatcagcgggctgcaccccacccattagcgccgcgcccgccagcagaatgtaagagagcgtcagcagcagcatcagcgtggaggttacagacgtaattggccccagcatcttcgccccgttggtggagacccacgttgagaaggcgaacagcaccatacttagcaccgttgtggcaaatggtgtgagaatgtactcatagccaagaaaggcataagaggcataggcaatgacgcgcggtaataacgaggtgaagaagaataaattcacgaaccagtatgtataagcggtaataaatgcccagcgcccgccgagtgaactttttacccaggcataaactccagcttctgagtttttattcaacgagacaaactcagcgataattaagcagaacgggataaaatagaacagggttgctaaaaagaacatcggcgcggaggcaagtccgagttcgatattattattgatcacgttgttaaaactaaacacggcggcaaaggtcagcgacagcaggccgaatttgccgatggtattgcgtttggtggtttcagacataacatttctccgggtaagaggctagcggtgcttcattggcaccgctcgtttttttatttgttatggaaataaccgtcttcgatggtcacattgagaatgacttttttgaccggctcctcgctgataaagcgatacgcctcatggttctcacaaattacgatctgcccctcgcgcacctgttcggtggtacccacgcctttcaggtattctcgatcggtctcatcgcggtagcactccactgtctgaagcgcatctttggcggcatattcaattttctgcgcgccctgaaggtagtaatgcacctcgaaatagcggcgatgcccgacaaacagcgcgtcggtgctggcatcattggtcacacggtaggccagcgaatcgccaatcgaatgggctacgccgggcgagatattatcgatattgttaatggcttctgagcagcgctgccatttgcgacccgtgcggtaatgctgttgaaactgttccaggctctcaagaacgatcatttgtctgcctcgctgtgcaaatccatggagaagaaaccggtgccgaattgctggcgtgccagcgccatcgaggcgatgcggccgccattgagcgggagcaatgtgaagccgtagcggaacggactgaaccagacgcgccagctctccagtacctcacttccccaggaattggagcctaagcccagcacctggtggtcaagattaagcgtgatgtcatcgcagcggcgcagttcgttgcagtgctgtgcggcgtgaatgttctcagccgtgtagtgccaggcgctgaagtggagaggctgttgcggtacgaccagcacgccgctgccatgacgatccgcgagggtggcccagcgcacctgctgacggttgccgttgttttgcgggaacggataattttcaaacatcttatcaaccgtggtgtgccacaggtcgatggtgctggcctgctggctgtccggatagttttcacccggccctcgcccgtagtagctcacctgatcgaaaccgccgttgatgccaagcgtaaagccgatgcacggaataatgtgtgggtactcgccgtagcgctcaccgcatagctcaacgttgatctgcccgtcggcggcgatgcgccagcgataggtacagcgcatgccaaaatcaaacactggcggggcaatcagggtacgggtggtgacgatgatcgcatcgtcatgctgctcaacctcgaaaccgcgcaggtgctcctgcatgatctggaaatgatacggctgccacagcccttcatactcctgcttatggttatcaatcatgggcttgaagaagttaatcttcggctcacgggtaaggtattcctcaccgttcacctgccaggcgctgagttttcccgatactttagagaaggtcgcgcggaagttatgcccggtcacggtgcagctcaggcgatcttcctccagacgcagcggagtggcactggtgttgataaacggtgtcgggcgtgccgtgcggccttttaacgggaactgatacaccgcgatctcgtgcccgacctcgctgtagcgcgtgggactgtttttgataatacgtacagtcagaaatgcttcgcgctcgtccagttccggcacgtgcaggctgacgctgcgggagctgttgggggccaacccggtgatgttcagtggctcgctgtgcagcgtttcaccttccgcacgcacctccgtgagcagggtgtaatcatccaggctggtgaaccataagcggttatcaacgtgcagctcaccgttttgccagcgcagtttgaccggggcgatcacctgcttgtactcacgcaaacctggcccgggcgtttgatcggagtagatcagcccgtcgaggcagaagttgtaattattggggtaatcaccgaagtcgccgccataggcgtaccagatgttgccgctggcgtctgttttctgaataccgtggtcgcaccactcccagacataatgcccctgaatgcagtcgtggcgatcgaacacgttctgatactcggtcaacccgccgggaccgttgcccatcgcatgggcgtattcgcagataatgcgcggtttggcgtgcgggtattcgccaaacagattcatcagcggtacgcgggtatacatggtggagataatgtccaccacctcggcgtcgcgatcttcttcgtagtgaagcaggcgagtatcatccagcgcttttgccgcacgggccatcgcgcggatgttacagccgtagccggactcgtttccgagcgaccagatgatgatcgacggatgatttttctgcgcgagaatatggcgttcgatacgctcaacgtagaccggctcccacaccggatcgtccgtaatgcggctcaggtcgccgacgttggcgaagccgtgagattccacatccgtttcagccatcacaaacaggccgtacaggtcgcaaagctcgtaaaagcgcgggtcgttcgggtagtgggcggtacgtaccgagttgatattgtgctgcttcatcaggatcaggtcgcgctccacgcgatccatccccaccgcgcggcccctcagatgatcattgtcatgacgattgacgccgtgcagcttcagataacggttgttaacgtagaacaggccgtctttcaccttgatatcccgaaacccgatgcgctgcgggatgatttccagcgtctggccatggttatcttttaaagtcatgaccagatgataaagatccggcgattcggcggaccactggcggggatgcctcacctcaatgctgaaggcggtttccgcacgctcgctgacggtcaggttgttggttgttccctggtgcagcactgtctcgccgtcgtacagggtataatccagttgcacacaggcagggcgtgcagcaaggttttccagctcaagctgacagaagagggtagcgtcccggtatgcctcgtcgaaggtggttttaaccgtgaaatcgcggacatgcgtgagtgattttcccagcaggtagacgtcgcggaatatccccgccgtccaccacatgtcctgatcctcaatgtaggtggaatctgcccactgcataacccgcacgcacaacaggttttgcccgctgtgtaccgcatcgctgatatcaaactcggcagacagtcggctgcctttgctaaagcctatatagcggccattcacgtagacttcgaaataggtttcgacgccgtcaaacttgataagggtctgtttctcttgccagctttcagaaagcgtaaaccagcgctggtatgccccggtcgggttgtctgacggcacccatggtacgtccaccgggaaaggaaagccttcgtcggtgtactgcaactgaccgtgaccttccatctgccacatgcccggcacggtaatatcgccccagtcggccatgtattctgaggtaaagttttccgggacaagcagcgggttcgtgaagaagcgaaagttccactttccgcttagcgacagaaagtggctgctggcttcacgcgcaaacgtgcgcgcccgggaaacggtgtcataagagaagaagtacgcacgcggcgggagccggttttcatgcgtgagttgaatattttcccagcgattcatgtgatctccctgtaggggtaaaacatcattgctggagattttagtaaatattttactaaataaaatcagtaaaaccgatttgctttaactcgatcacgaaattaaaaaagccgggcgtgcccggcgggagagttaacaggtggaaatcagcgggtggtgccgcgcagcttcagtacgctcgggacaaagacctgaagcggtagtgcgcggccatcgcgggccttttccagcagcagattaacgccctggctgcccatcatttcagagtgaatgcgcacggtggaaagaggcgggaaggtaaagcgggcggttggaatgtcgttcacgctgatcagtgaaatatcttccgggatcgccagccctttttcgtgaatggcgcgtaacaccccgatggcgatggaatcggaggccacgaacaaggcggaaggccagcactgttgtgccagcatgatttttgccagttcataaccggacgagctggaaaaaccgccgcgccagatgtcctgttccgataccacccctttcaggagcccgtactccacgaaggcggcttcccgaatatcagccttgcctggctcatcttcgccgccgataaagccaatccgcttaactccctgagcaataaagaaatccacgatctgcttgctgatgcgcgaaaggtcaatatcgacagaatcgtactcgctgcctggctcgtgaaagtcgataaaacagacgttgtcggtcaacgacattgccgcacgtcgaagcgcaggggagggtttgcctacaatcaacaccccggtgagctttttcagctccggcagggtggcattagcgtagcagttactcagttcgacccccagtttttcgcactgcgtctcaatgccgtggcgaatggcaagatagtaagggtcgttgatctccagttcctgctggtagctgtagagcgccagaatatgttgctgaccggcagcgacagactgcattttacgggaggtcgtgcttttgtattccagcttctcggcaatctccagaatgcggtgtttcgtctcttctttcacattcagcgtcgggtcatcgtttaaaacccgggataccgttgccagcgagacgccagcttccgtcgcgatgtctttcagcgttgccatgtttgtccttattccccacgagatagcttattgtaaaggatgcgttcggacatgcattaatttttagtaaataacatccctgttgccctcgccagttaccgtgttagtatttagtaaaattttaccaaggaggcaaaagtggaaacggtagcatacgatgattttgcaaagctcgagatccgcgtggggaagattgttgacgttaaacgtcacgccaatgcggacaagctctatattgcgcagatagaggtgggagacagaacgttgcaaaccgtcaccagcctggtgccgtattaccgggaagaggagctgatgggcaaaacggtggtggtgttgtgtaacctggcaaaggctaaaatgcgcggtgaaacgtctgaatgcatgttgctctgcgcggaaaccgatgacgcccgagaaagtgtgttattaacgccggagcgggtgatggcggcaggggtaagagtggtgtgaaaaagccgggtggcggctacgccttacccggcctacaaagcctcgaaccgcaggccgggtaaacgacagcgtcacccggcaaaagcactacagcacgcttagcgccttctccaccacgttctcaacggtaaagccgaaatatgggaacagcttgtcggccggggcggattcaccgtaaccatgcatcccgacaattgcccctttcaggcccacgtatttgtaccagtagtcggcaatgccagcttcaaccgccacgcgcgccgcgacgtttgaaggcagcaccgattcgcggtacgcctcatcctgagcatcaaagatatccgttgaaggcagggaaaccacgcgcaccgcgtgaccctcggcggtcagtttctccgccgcttttaccgtgatttccacctcggaaccggtggcgatcaggatcacgtctggcttgccgccgctgtctttcaggatgtacccgccgcgggcgatatttttcacctgctccggcgtgcgctcgatctgcgccaggttctggcgcgacaggatcagcgccgtgggtccgttatgacgctctacggccagcttccagcccactgccgcttccacctgatcgcaaggacgccaggtgctgaagtttggcgttaagcgcaggctcgccagctgctctaccgcctggtgcgtcggcccatcttcacccagcccgatagagtcgtgggtgtacaccatgatttgccgcgccttcatcagggccgccatacgcgccgcgttacgggcatattcgacaaacatcaggaaggtggcggtgtacggcacgaagccgccatggtgggcgatgccgttggcaatggcggtcatcccaaactcgcgcacgccgtagtggatgtagttcccggcaatgtcctccttcagggatttagagccggaccagatggtaaggttacttggcgccagatccgccgagccgcccagcagttcgggcaggattgggccaatcgcgttaagggtgttttgtgatgccttacgggtggcaattttcgccgggttggattgcaggttttcaatcagcgcctgggttttctcttcccagtcttccggcaggccgccgctcatgcggcgggtaaactcagccgccagctccggatacgcttttttgtaggcggcaaacttctcgttccaggcctgctgcgctttttcacctgtttcgcgagcatcccaggccttgtagatctcttttgggatctcaaaggccgggtgtttccagcccagtttctggcgggtcagcgccacttcctcttcacccagcgccgcgccgtgcgcctcctctttgcccgctttgttcggcgagccgaagccgatggtggtgcggcagatgatcagggacggtttgtccttcacgctctgcgcttcctgaatcgcttttttcaccgcctcaggatcgtgaccgtcgatctcgtgcactacgtgccagtgataggcttcaaagcgtttcgccgtatcgtcggtaaaccagccctcggtttccccgtcaatggagataccgttgtgatcgtagaagccaatcagcttgcccagccccagggtgcccgccagagaacagacctcgtgagagatcccctccatcagacagccgtcgcccataaagacataggtatagtgatcgacaatctcgtggtcgggctggttgaactgcgcggccagcgtacgttcggcaatcgccaggccaaccgcattcgccagcccctggcccagcgggccggtagtggtttcaacgcccggcgtatagccgatctccgggtggcccggcgttttggagtgcagctggcggaagttttttaattcctcaagcggcagatcgtagccggaaaggtgcagcaggctgtagagcagcatcgaggcgtgcccgttggaaagaataaaacggtcgcggtcgtaccaggtcggatcggtagggttgtgcttcaggaagtcgttccacagcacttcggcgatatcagccatacccatgggggcgccagggtggccggaattggctttttgtacggcatccatgctgagggcgcgaatggcgttggcgagctctttacgggacatagttcactccgtggcaaggttaaagtttggcggcgagaagatcttcgagtttgcgctggtcgacggcgaactgacggatgccgtccgccagtttttccacggccattggatcctgattgtgctcccagcggaattccgcttcggtcatgggttttggttttggcagaacggtagaggttggcaccagcttgcggatcaccgtctcttcactctcctgaagcttcttcagcaggtctggggagatggtcagccggtcgcagcccgcgagcgcgaggatctgctcggtgcggcggaagctggcccccatcacgatggtctcgtagcggtgctgcttgtaataatcgtagatattacgcaccgatttcacgccgggatcttcgtccaccacatacggatccatcggctgtttcgcctgataccagtcgtagatacgtccgacaaacggtgaaatcaggaacacgcccgcttcggcgcaggcacgcgcctgggcgaaggagaacagcagcgtcaggttacagttgatcccctctttctccagcacttccgccgcgcggatgccttcccaggtggaggcaagcttgatcaggatgcgtgatttatcgatcccctgctcctggtagagttccaccaggcggcgagccttgctaatgctcttttcctggtcgaatgagaggcgggcatccacttcggtggagacgcgtcccggtatgcttttaagaatttccgcaccgatattgaccgccagcttgtcactggcttcggcgacctgctgctcctgcgttttaccgcgctgtttgccgtaggcaagggcgtcatcaatcagatgactaaagtgcgcaagaccggccgccttgagcagcagcgaggggttggtggtcgcgtcttccggctggtagtgacgaatcgattcgatgtcgccgctgtctgcaaccacggtggtaaattgtttgatgccgtctagctggttcataattactccttggaaataaaagagttagtcgagtgcgtcaggtcacacttctgagaaaatcatgatggacttaacaaaaaagcatagcagacgggggaggcattgctgtctgagacgggtaacatggctgttataaattgataacaatttttattctgcaatggtgagagtttggcagccttcaaagtttaggagcctgcctgcggcgatactatgcggcacaccagggtgtgcataggaacgtcaacatcaccctttttgaccgaaacgtgaaaggaataacaagatggatgatcagttaaaacaaagcgctctcgattttcacgagtttcctgttccgggtaaaatccaggtatccccgaccaaaccgctggcgacccagcgcgatctggcgctggcctactcgccaggcgtagctgccccgtgccttgaaatcgaaaaagatccgctggcagcgtacaaatacaccgcccgtggcaacctggtggccgttatctctaacggtacggcggtactggggttagggaacattggcgcgctggccggtaagccggtgatggaagggaagggcgttctgtttaagaaatttgccggtatcgacgtcttcgatatcgaagtggacgaactggacccggataaattcatcaacgtggtggcggcgctggagccgaccttcggcggcatcaacctggaagacatcaaagcgccggaatgtttctatatcgagcagaagctgcgcgagcgtatgaacattcccgtgttccatgacgaccagcacggcacggcgattatcagtaccgccgccattctgaacggtctgcgtgtggtggagaaaaacctctccgacgtgcgcatggtggtctccggcgctggcgccgcggccatcgcctgtatgaacctgctggtggcgctgggcatgcagaaacacaacatcgtggtctgcgactccaaaggcgtgatttacaaagaccgcgagccaaacatggcggaaaccaaggcggcctatgcggtggaagacgacggcaagcgcacgctagaagacgtcattgaaggtgccgacattttcctcggctgttcaggcccgaaagtactgacccaggagatggtgcagaagatggcgcgcgcgccaatgatcctggcccttgcgaacccggagccggaaattctgccgccgctggcgaaggcagtgcgtgaagacgcaatcatctgtaccggacgttcggactacccgaaccaggtgaacaacgtgctctgcttcccgttcatcttccgcggtgcgctggacgtcggcgctacggcaatcaacgaagagatgaagctcgccgccgttcatgctatcgcagagctggcgcacgccgagcagagcgaagtggtggcctccgcctatggcgatcaggatctgagcttcggcccggactacatcatccctaaaccgtttgacccgcgtctgatcgtgaagatcgcgccagcggtggccaaagcggcgatggactctggcgtggcgacgcggccgattgaagatttcgatgcctacgtcgataaactcaccgagttcgtctacaaaaccaacctgtttatgaagccgatcttctcccaggcgcgcgctgacgcgaagcgcgtggtgctggcggaaggggaagaggcgcgcgtgctgcatgccacgcaggagctgatcaccttagggctggcgaaaccgatcctgattggtcgtccgagcgtgatcgagatgcgtatccagaagctgggcctgcaaattaagccgggcgtcgactttgagatcgtcaataacgaatccgatccacgcttcaaagagtactggaacgaatactattcgatcatgaagcgccgggggatcacccaggagcaggcgcagcgggcggtgatcagcaacaccacggtgatcggcgcgatcatggttcatcgcggtgaggcggatgcgctgatctgcggcaccatcggcgagtatcatgagcatttcagcgtggtgcaggagatcttcggctatcgcgagggggtccatactgccggcgcaatgaacgcgctgctgctgccaagcggtaacacctttatcgccgatacctacgttaacgacgatccaaccccggacgaactggcggaaatcaccgtgatggcggcggaaaccgtgcgccgctttggtatcgagccgaaagtggcgctgctgtcgcactctaacttcgggtcatccaaatccgcggcggcgtgcaaaatgcgccagacgcttggcctggtgcgcgagcgtgcgccggagctgatgatcgacggcgagatgcacggcgacgccgcgctggtggagagcattcgtaatgaacgtatgccggacagcccgctgaaaggctcggcgaacgtgctgattatgccgaacgtagaagcggcgcgtatcagctataacctgctgcgcgtgtcgagttctgaaggggtgaccgtagggccagtgctgatgggggtgtcaaaaccggtacatgtattaacgccgattgcctccgtgcgtcgtatcgtcaacatggtggcgctggcggtggttgaggcacagacgcagccgctgtaagcgctgcgtgtcgggtggcgtgttcgcttacccgacctacgggactcgtaggccggataagcgcagcgccatccggcagttacacccagtcccgaacccgaataaactcacgcaaggcagcctccgggctgccttctttgggttcaaagctgtattcccagcgcaccagcggcggcatcgacatcagaatggactccgtgcgcccaccggtttgcaggccaaacagcgtcccgcgatcccataccaggttaaactccacgtaacgcccgcggcggtacagctggaactcacgctcgcgaacgccgtagtcggtgtttttgcggcgttcgacaatcggcagataggcatcggtaaagccttcacccactgcgcgcataaagctgaacgcggtatcaaaatccggcgtgttgagatcgtcaaagaacagcccgccgatgccgcgttgctcgtcgcgatgcttcagatagaannnnnnnnnnnnnnnnnnnnnnnnnnnnnnnnnnnnnnnnnnnnnnnnnnnnnnnnnnnnnnnnnnnnnnnnnnnnnnnnnnnnnnnnnnnnnnnnnnnnnnnnnnnnnnnnnnnnnnnnnnnnnnnnnnnnnnnnnnnnnnnnnnnnnnnnnnnnnnnnnnnnnnnnnnnnnnnnnnnnnnnnnnnnnnnnnnnnnnnnnnnnnnnnnnnnnnnnnnnnnnnnnnnnnnnnnnnnnnnnnnnnnnnnnnnnnnnnnnnnnnnnnnnnnnnnnnnnnnnnnnnnnnnnnnnnnnnnnnnnnnnnnnnnnnnnnnnnnnnnnnnnnnnnnnnnnnnnnnnnnnnnnnnnnnnnnnnnnnnnnnnnnnnnnnnnnnnnnnnnnnnntttcgggtaaacgtcttcgccaaacggcaggcagaggtcgcgcgcggtggtgtgccagtgcacggcgtcctcttcgaagccatagtaaggcgttaagtcgaaaccgccgccaaaccaccagaccggatcggcccccggtttttccgcgatgaaaaagcgcacgttggcgtggctggttggcacaaacgggttatgcggatgcaccaccagcgagacgcccatcgcctcgaagctgcggcccgccagttcaggccgatgcgccgtggcggacgccggcattgcatcaccgtggacgtgggagaagttgaccccggcctgttcaaaaatgccaccgttacgcagcacgcggctgcgcccgccgccgcccgcttcgcgctgccaggcatcttcctggaattcaccgccgtctgcggcggccagtttctggcaaatcgcgtcctgtaactgcatcaggaaagttttgaccagctgtgcattcggtttcatcaacgtttcctggagtgcgctttttgattatcgaaccagttgaaataactgatgaccccggaggcgatagcgttcgcgatcttctgacgaaacgccgtggtgccgagtaaacgctcctcttccgggttggtaatgaacgaggtttccaccagcacggacggaatggacggggacttcagcaccacaaacgcggcctgctcggtgcttttactgtgcagacggtgcacgggcttaatccgtttaaggatatgcgagccgagcgtcaggctgtttttgatggtatcggtctgcacgagatcaaacagaacctgctgcaacagatggtctttgtcggtggcttttttcccggccacttcatccgcccggttttcgcgatcggagaggtatttcgccatggcgctactggcgccacggttggagagggcgaacaccgatgcgcctgcggcggaagggtttgtgaagccatccgcgtgaatggacataaacaggtcggcgccgtgcttatgggcaatttccacgcgatcgtacagcgggataaacgtgtcgcccgtgcgcgtcaggcgggcgtcaatgccgttgctgcgtaaaattgcgcgcacattttttgcaattgccagcacgacgtgtttttctttcgacccgtttcggccaatggcgccggtgtcgatcccgccgtggcccggatcgagcatgaccagacgctttgccccggcttttttggttttcggcttgctgtgtccgttactggttttaagcgagctctcttcttttgcctgagcctgctttgcgatgcctgttaacgttaaggccgccagccccgctttgagaacctgacgacgcgatgtgagtgcttttaatggtttgaatgtgctcatgcggcctgaattgtaaaaattggggtcctggtgttatatcgtatcgcgttttgcgtgacgacattccttattgagaattgttttacttttcatttcaatacgtgacaaagtgacattatgccaaattttggcgagtttttccccggttattggctaaatgccctgttcacgccataatcactgtttttaaacccgaaaaggcggttaataccatggagatacgcgtttttcgccaggaagatttcgaagaggtgatcaccctttgggagcgctgcgatctgctgcgtccgtggaacgatccggaaatggacatcgaacggaaggtgaatcacgacgtcagtctgtttctggtcgctgaggtcaacggcgaggtggtcgggacggtaatgggcgggtacgacggccaccgcgggtcggcctactatctgggcgtgcacccggaatatcgcgcgcgcggcatcgccaacgcgctgcttaaccgtctggaaaagaaactgatcgcccgtggctgcccgaaaatccagattatggtgcgggaagataacgacgtggtgctgggcatgtatgaacgtctgggctacgagcacgcggatgtactgacgctgggtaagcgcctgatcgaagatgaagagtactgagttccaccctggcgactatgatgttcacggtcgtctgcgtctgccttttttattctggtgcgttctgctgttgcaggcccgcacctgggtgctgttcgtgatggctggcgcgtcacgcgggcagggcgatacgctactgaatctcttttatcccgatcacgatgcgttctggctggggttactgcccggtgtaccggcggtgctggcgttcctgtgcagcggtcggcggcagttcctcccgcgcttctggcgcgcacttcgctggctgttgattctggcgcaggttgtgctcctggtctggcagcccgtgctctggctgtacggcgagccgctttccggtatcgggattgcgctggtggtggcggatattgtcgcgctgctgtggctggtcacgaatccccgtttacgcgcctgttttacgcaagagtcagattaaaacggcactttttgccgatactgcactccaacaagcgttgatttactacgtaaggacgtctcaatgaaatcgctgcgtttacttttatgcgctctcccgctggcgttaaccggctgttccacgctctcatccatcaactggtctgcggcctatccgtggaactggtttggctcctcaacggaagtgaccgagcagggcgtgggcaaaatcaccgcctcgacggcgctggatcaggatgccattcaggaggccatcggcagtgattatcgcctgcgcagcggcatgaaaaccgagaacggcaacatcgtgcgctatttcgaagcgttgaaagacgacaaggtggcgatggtcatcaacggcgataaaggtacggtcaaccgcattgcggtgatggatgaagagatcccgacctcaggtggcgtgaaggtaggtacgccgtttggcgagctctaccagaaagcgtttggccactgcgccagcgtgccgtcggatgacagcgtggcggtcgagtgtaaggccgacggcagccagcacattagctatgtattcagcggcacctggaacggtccggaagggttaatgccgtctgacgacaccctgaaaaagtggaaagtgagcaaaattatctggaagcagtaatttgcgcctgagcaagccgcctcgctgaaatccaggtataatagccgccatcaatgccacgctgtcgtggcatctttttttcaggaggagcgatgtctcaggttcagagtggcattttgccagaacattgccgcgcggcgatttggattgaagccaacgtcaaaggggacgtggatgccctgcgcgcggccagcaaaattttcgttgataaactggccacctttcaggccaaattccccgaagcccatctgggcgcggtggttgcctttggcaacaccgtctggcgtcagctgagcggcggcgaaggcgcagaagagctgaaagactttattccttatggcaaaggtcttgcgcccgccacccagtatgacgtcctgatccatatcctctccctgcgccatgacgtgaatttctccgtcgctcaggcagcgattgaggcctttggtgacagcatcgacgtgcaggaagagatccacggtttccgctgggtggaagagcgcgatttgagcggcttcgtcgacggcaccgaaaacccggccggggaagagacgcgtcgcgaggtggctgtaatcaaggatggcgtggacgcaggcggcagctacgtgttcgtccagcgctgggagcataacctcaggcagcttaaccgcatgagcgtgcatgaccaggagatgatgattggccgcaccaaagacgccaatgaagagattgacggcgatgcgcgtccggtcacgtcccacctgacccgcgttgaccttaaagaagacggtaaggggctgaagattattcgccagagcttgccgtacggcaccgcgagcggtacgcacggcctgtacttctgcgcttactgtgcgcgcctctacaacatcgaacagcagctgctgagcatgtttggcgataccgacggcaagcgtgacgccatgctgcgcttcacccgtccggtgaccggcggctactactttgcgccgtccgttgagcgcctgctggcgctgtaaatcgctctccattcgtaggccgggtaagcgttagcgccacccggcaatttctcccgcaccccttattcccttttctgcttctaaatcaccaaacggtatataaaaccgttactcctttagactccgttataaatattatgactataagatagtcatcacatttataagggtgcgcaatggccgttactgtactgaaaaaaggatcgctggcactggcaggtttactgctggtggcgcaggcgcaggcaaccgagttgctgaacagttcttatgatgtttcacgcgagctgtttgccgcccttaatcccgcatttgaacagcagtgggcgaaagagaacaacggcgacaagctgaccatcaaacagtcgcacgctggttcatccaagcaggcgctggccattttgcaggggctgaaagcggatgtggtgacctacaaccaggtcacggacgtgcagatcctgcacgacaaaggcaagctgatcccggcggactggcaaagccgcctgccgaacaacagttcgccgttctattccaccatgggcttcctggtgcgcaagggcaacccgaaaaacattcacgactggaacgacctggtgcgttctgacgtcaagctgattttcccgaatccgaaaacctccggcaacgcgcgttatacctatctggcggcgtggggcgcggcggacaaagctgacggtaacgataaagcgaaaaccgaacagtttatgacccagttcctgaaaaacgtcgaagtgtttgacaccggcggccggggcgcaaccaccactttcgccgagcgcgggctgggcgacgtgctgatcagctttgaatccgaagtgaacaatattcgtaaacagtacgaagcgcagggcttcgaagtggttatcccgaaaaccaacattctggccgaattcccggtggcgtgggtggataaaaacgtcaaagccaacggcacagagaaagcggcaaaagcctatctcaactatctgtacagcccgcaggcgcagacggtgattactgactattactaccgcgttaataatccggacgtgatgaacaagctgaaagacaaattcccgcagaccgagctgttccgcgtggaagatcatttcggcgcctggcctgaggtgatgaaaacgcattttgccagcggcggtgagttagacaaattgctggcggcggggcgtaagtaatgtttgcaggatcaacaagacgtgtgctgccgggttttaccttaagcctcgggaccagcctgctgttcgtctgtctgattttattgttaccgctcagcgctctggtgatgcagctcgctgagatgagctggtcccagtactgggaagtggtcaccaacccgcaggtggtggcggcctacaaggtcacgctgctgtctgcgttcgtggcctcgatttttaacggcgtgtttggcctgctgatggcatggatcttaacccgctatcgcttcccgggccgcacgctgctcgacgccctgatggatctgccgtttgccctgccgacggcggtggccggtctgacgctggcgtcgctgttctccgtgaacggcttttacggcgaatggctggcgaagtttgatattaaagtgacctatacctggatcggtatcgcggtggcgatggccttcaccagcatcccgtttgtggtacgtaccgtgcagccagtgctggaagagttaggccccgaatacgaagaggctgcggagaccctgggcgccacgcgctggcagagtttccgtaaggttgtgctgccggaactttctccggccttgctggcgggggtggcgctttcctttacccgcagccttggtgaatttggcgcggtcatttttatcgccgggaacatcgcgtggaaaaccgaagtgacctcgctgatgatttttgtccgtttgcaggagtttgattatccggcggcgagcgcgattgcctcggtgatccttgccgcgtcgctgctgctactgttttcgattaacactctgcaaagtcgctttggtcgacgtgtggtaggtcactgatggcggaagttacgcaattgaagcgctatgacgcgccccgcatcaactggggcaaatggtttctgattggtaccggcgtgctggtctccgcattcattctcgtcgtgccgatggtgtacatcttcgtgcaggccttcagcaaagggattatgcccgcgctgcaaaacctggccgatccggacatgctccacgccatctggctgacggtgattattgccctgatcaccgtcccggtgaatctggtgtttggcgtattgctggcctggctggtaacgcgctttaacttcccggggcgtcagctgctgctgaccctgctggatatcccgtttgcggtgtctccggtggtggcgggtctggtttatctgctcttctacggctccaatggcccgctgggcggctggctggatgaacacgacctgcaaatcatgttcgcctggccgggaatggtgctggtgaccgtctttgtcacctgtccgttcgtggtgcgcgagctggtgccggtgatgctcagccagggcagccatgaagatgaagccgcggtgctgctcggcgcttccgggtggcagatgttccgccgcgtcacgctgccgaatatccgctgggcactgctttacggcgtggtgctgaccaacgcccgtgcgatcggtgagtttggcgcggtgtcggtggtatccggctcgattcgcggcgaaaccctgtcgctgccgttacagattgaattactggaacaggactacaacaccgtcggttcctttactgccgcagcgttgctgacgctgatggcgattttgaccctgtttttgaagagtgtggtgcagtggcgtttagagaatcaggaaaaacgtcagcatcaggagggaaatcatgagcattgagattgccaatattaagaagtcttttggtcgcacccaggtgctgaatgatatctcgctggatatcccttccggacaaatggtggcgctgctggggccgtctggctccggtaaaaccacgctgctgcgtattatcgccgggcttgaacaccagaccagcggacatattcgcttccacggtacggacgttagccgcctgcatgcccgcgaccgtaaagtgggctttgtatttcagcattatgcgctgttccgccacatgacggtattcgacaacatcgcgtttggcctgaccgtgctgccgcgtcgtgaacgtccagatgccgccgccatcaaagcgaaagtgaccaaactgctggagatggtgcagcttgcgcatctggcggaccgcttcccggctcaactttccggcgggcagaagcagcgcgtggcgctggcgcgtgcgttagccgttgaaccgcaaatcctgctgctggacgaaccgtttggcgcgctggatgcgcaggtgcgaaaagagctgcgccgctggctgcgtcagctgcatgaggaactccagttcaccagcgttttcgtgacccacgatcaggaagaggcgatggaagtggccgatcgcgtggtggtgatgagtcagggcaacattgagcaggttgacgagccagagcagctctggcgtgaaccggcgacccgctttgtgctggnnnnnnnnnnnnnnnnnnnnnnnnnnnnnnnnnnnnnnnnnnnnnnnnnnnnnnnnnnnnnnnnnnnnnnnnnnnnnnnnnnnnnnnnnnnnnnnnnnnnnnnnnnnnnnnnnnnnnnnnnnnnnnnnnnnnnnnnnnnnnnnnnnnnnnnnnnnnnnnnnnnnnnnnnnnnnnnnnnnnnnnnnnnnnnnnnnnnnnnnnnnnnnnnnnnnnnnnnnnnnnnnnnnnnnnnnnnnnnnnnnnnnnnnnnnnnnnnnnnnnnnnnnnnnnnnnnnnnnnnnnnnnnnnnnnnnnnnnnnnnnnnnnnnnnnnnnnnnnnnnnnnnnnnnnnnnnnnnnnnnnnnnnnnnnnnnnnnnnnnnnnnnnnnnnnnnnnnnnnnnnnnnnnnnnnnnnnnnnnnnnnnnnnnagggcaccattcgcggcggtcagttccacgttggcgcgcaccgctggccgctggggtatacctccgcgcatcaggggccggtggatctgttcctgcgtccgtgggaagtggacgtcagccgccgtaccagcctggattcaccgcttccggtgcaggtgctggaagctagccctaaagggcactacacccaattggtggtacagcccctgggctggtacaccgagccgctgaccgtggttatgcgtgacgacgtgccgccacaccggggggagcgcctgtttgtcgggctgcaacacgcgcgcatttatcacggtaacgagcgcattgaaacgcgcgaggatattgctctggcggagtcagcctgataggttattagtatgtttatcgcccggtggcgctgcgctgaccgggcctacagttatcactgcgtcttgtaggccgggtaagctaagcgccacccggcttttttattgagtaaaaatcgtgaatacactcgaacacaccatcggcaacacccctctggtcaaacttcagcgcatggggcctgataacggcagcgaaatctgggtcaaactcgaaggcaataacccggcggggtcggtgaaagaccgggcggcgctgtcgatgattgtccaggccgaaaagcgcggtgaaattaagcccggcgacgtgctgatcgaagccaccagcggtaacaccggtatcgcactggcgatgattgccgccctgaaaggctaccgcatgaagctgctgatgccggacaacatgagccaggagcgccgcgccgccatgcgcgcctatggagccgagctgattctggtgagcaaagagcaggggatggaaggggcgcgagatttagcgttagcgatgtcggagcgcggggaaggcaagcttctcgaccagttcaacaacccggacaacccgtacgcgcactacaccaccactggcccggaaatctggcagcaaaccgacgagcgcatcacccactttgtctccagcatggggaccacgggcacgatcaccggtgtgtcacgctttctgcgcgaacaggagaagccggtgacgattgtcggcctgcaaccggaagaggggagcagcattccgggcatccgccgctggccggcggagtatatgccgggcatctttaatgcgcagcttgtggacctggtgctggatattcatcagcgcgaggcggaaaataccatgcgtgagctggccgtgcgtgaaggtatcttctgcggcgtcagctctggcggtgccgtagcgggtgcgatccgggtggctgagtccacgccgggggcggtggtcgtagcgattatttgcgatcgcggcgaccgttatctgtctaccggcgtctttggtgaagagagttattcgcagggggcggggatttaagcgtcatggagatgattttattccgggataacacccgggcgcagcaaaccgatattgtcgccgttcagtcgcaggtggtgtacggcagcgtgggaaacagcatcgcggtgccgaatattcgcacccaccggttgaacgttaccgccgtgccaacggtgctgttcagcaatacgccgcactacgacaccttctacggcggggtgatcccggacgagtggttcagcggctaccttaaggcgctggaagagcgcgagatcctgcgcgagcttaaagcggtcaccaccggctatatgggcagcgccagccagatcgcgctgctggcgcagtggctgaaggcaatcaaagtgcaacatcccgatctgctggtgctggtcgacccggtaattggggatatcgatagcgggatgtacgtgaagccggatattcctgaagcctaccgtgagcatctgctcccgctggcccagggcattacgcccaacgtgtatgaactggaagtgctgagcggcaaaccgtgccgtacgccggagagcgccattgccgccgcgcaggggctgctgtccgactcgctgaaatgggtagcgatcaccagtgcgccagtgtctgacgatccgcagaatatccacgttgtgctggtgagcgaagaaggtgttaccgtaagcgcgcacccgcgcgtagagacggatctgaaaggaacgggcgatctgttctgttcggagctggtcagcggcattgtgggagggaaaaccgttgccgatgccattcgcatggcgggcgatcgggtgactgacgttatgatctatacgcagtcgaaaggctatgacgagcttatcctgccggcataaacaaaaatggcgcccgaaggcgccatttttctgtgcggcaagaattacttcttgatgcggataaccggggtttcacccacggtgacgctgccagacagtttgatcagttctttgatttcgtccatgttggagataacaaccggagtcagggtagacttcgctttttcttccagcagcggcagatcgaattcaattaccgggtcgccaactttaacacgctggccttcttctgctatacgtttgaagccttcgcctttcagttcaacggtgtcgataccgaagtgaacgaacagttcgataccgctatcggattcgatagagaacgcatggttggtttcaaaaattttaccgatggtgccgtcaactggagcaaccattttgttgccagttggtttgatagcaatgccatcaccaacgattttctcagcaaacactacatccggcacgtcttcgatgttgacgatctcgccggagagcggagcaacaatctcaatagttccggagtctttcttgtcatcagaaaccagagatttcagtttatcgaacaaacccatgatcttctcctaagcagtaaattgggccgcatctcgtggattagcagattgttttttcttcaatgaacttgttaaccagcgtcattaactcgtccgttgtcggttgagcaagagcctgctctgctaacaccttcgcatcttcgaagttcgtgttacggataatcttcttaatgcgcgggatggaaatggcgctcatagagaattcgtccagacccatacccagcaacagaagtgtagcacgttcgtcgcctgcaagctcaccacacatgccagtccatttaccttctgcatgagaagcatcaataacttgcttgatcaaattcagtacggacggtgacattggctggtagagatgtgaaatcatatcattaccacggtcaactgccagggtgtactgcgttaaatcattggtaccgatactaaagaaatcaacttctttggctaaatgacgcgcaatggtcgcggctgccggtgtttccaccatcacgccgatctcaatggattcgtcaaatgctttaccttcgtcgcgcagttcctgtttgtagatttcgatctctttcttcagtgcacgcacttcttcaacagagatgatcatcgggaacatgatgcgcagtttaccgaaagcggaggcacgcagaatagcgcgaacctggtcacgcaggatctctttgcgatccatggcgatacgcacggcacgccagcccaggaacgggttctcttctttcgggaagttcatgtacggcagctctttgtcgccaccgatgtccatggtacggacgattacagcctgcgagccgcacgcttccgcaaccgctttgtacgctgcaaactgctcttcttccgttggcagagcgtcgcgatccatgaacaggaattcagtacgatacagacctacaccttccgcgccgttgcgctcagcgccgtcaacgtcacgtacggtaccgatgttagcgcacacttcaacctgatggccgtccagcgtgatagctggcagatctttcagtttagcgagttccgctttctcggtagcaacctgctcctgaacggaacgcagctgctcgatcacatcgttagttgggttgacgtaaaccacattgtttacggcatccagaatcagatagtcgtcgtttttaacctgggaggtaacgctaccggtacccacaatggctggcagctccagagaacgcgccatgattgaggtgtgggaggtacgtccacctgcatcagtaatgaaacccagcaccttgttcaggttcagctgtgcggtttcagacggggtcaggtcagcggcaaccaggatgacttcgtcctgaatcgcgctcagatcgatgatggccagacccaggatgttgcgcagcaggcgcttaccgatgtcacgtacgtcagccgcacgttctttcaggtattcatcgtccagctcttccagggcagatgcctgaccttcgataacttcatgcgcagccgcgtcggccgtcatgcctttatctttaatcagggctatgatttcctgctccagctcctcatcttcgagcagcataatgtgcccttcgaagatggcttctttttcttcaccgaaagtttcgccagctttagttttaatcgcttccagttgcgcagatgccttggcacgaccgctcagaaaacgttcaacttcctgatcaaccttgtcggcagaaatttttttccggtcaatgacgatttcgtcttctttcagcagcaatgctttgccgaaagcgatacccggggatgctaaaatgcctgaaatcataaccctaccttacttgtgactgatattgaaaagaacccggtaaacttactcgagttcagccatcagcttaaccagatgctcaactgctttctgctcgtcttcaccttcagcggagatggtaacaacggtaccctgagtcaggcccagagtttgcagcttgaacaggctttttgcgctagcgcttttgccgttggaagtcacggtgatttcagaagtgaagcctttcgcttctttaacaaactgagcagcagggcgggtgtgcagaccgttcggagcggtaatggtaacttcttgctggaacattgtatttccccaacttataggtttagtgttgtggaactaaagtctagcctggcgacttaactttagcctgtatagttagcgctgacgtttcaatcgtcattaaacattatgcagtgaaagcaagacttgaaccaaatcataaaatcgattcagcagcgctatttcgttcaccgattaatttcgcgcatcaaaataattgctggtttaaataccagacccaacggggtgtagcaatgccaggaggggtaaaactttgaagcaggccacaaaaaagcacctgaaaaggtgcttttttacgcgtttttaacatgctggcatcactgttgcagttctttctctgtgaagagatcggcaaacagtgctgtgcttaagtaacgctcacccgaagacggtaggataaccacaatgttcttattggtaaaggtttcatcttccagcagtttgagggctgccgcaaccgccgcaccggaagagatacccgccagaatgccttcctcgtccatcaggcgacgcgccgtggagatggcttcttcattggtaatggcgacgactttatcgatcagcttcagatccaggttgcctggaataaagccagcgccgataccctggattttgtgagggccaggtttgatctcttcgcctgccagcgcctgagcgataactggtgagtcggttggctcaacggcaacggtaatcagatcttttttacctttcgtgcctttaatatagcgagacacaccggtcagcgtaccgccggtgcctacgccggagataaacacatcaacctgaccgtcggtatcttcccagatttccgggccggtggttttctcatgaatttccgggttggccgggttgctgaactgctggagcagcagatactttgccggatcgctggcaacaatttcttcggccttctgaatcgcgcccttcatgccttttgcgccttcggtcaggaccaggttcgcacccagcgctttcagcagcttacgacgctcaatgctcatggtttcaggcatagtcagcgtcaggttatagccacgcgccgccgcaacataggccagagcgataccggtattgccgctggtgggttcaaccagctcaacgccaggtttcagcacgccacgcttttcagcatcccaaatcatattcgcaccgatacggcatttaacgctgaagcttgggttacgagattcgaccttcgccagaatgcgtccattaccgatacggttcagtcgaaccaggggcgtatgaccgatagtcagcgagttgtcttcataaatcttactcatggcctgtccttaactgtatgaaattgggataccgacccagcatacctgttgaacaggtatggggaagtaaggaaatcgcatatctatatgctgcaaggaaataatggggatcagtatggaataaggggcggcataagccacccctcttttacacatttttgcattacttccataacgcgtgcttagcacggtagcagtccacccacatcgccgtcgcgccgcaaacggcaacgggcatgatgaacaaattcaggaaagggatcatggtgaacaggctggtcagcgcgccaaactgcatgttggcaaccttctgagtgcgcagggcagtgcgcatctctttaaacggcactttgtggttatcgaacggataatcacagtactggatagcgagcatccaggcgctgaacaggaaccacagcacgggcgcgaccgtctggccaatcccgggaacaaaataaagaataagcagcacaatcgcccgcggcaggtaccaggcgaacttctgccattcacgcttcatgatgcgggggagatctttcacgatccccagtacgcccgtgtcaggtggcgtcgcaccggtaaggcgcgcttccagctgttcggccagcagaccgttgaacggcgcggctatccagtttgctatcgtcgaaaagaaataaccgaaaaccagcagcacggagataaccgcaatcggccagagcaggtagtctagccactgtaaccagtccggcacatagctcatcagggaagggatccagctttccagtctggtgaacagccaccagaaggccccgcccatcagaataatgttgatcagtaacggcaaaataacgaagcgtcgaatgcccggcagggagaccagtttccagccctgagaaaagtaccagaccccgctgcgtggggcagaagaagatgttgaaaccataccaggctgtactcctttttacacaaccagtggaattgcccgcctatattatccagttacgggccaatgaccagttcggaaatgttcgaaaaaccagcaaaaagcacgatttagttcatctttatgctgtgaatgctctgcatacacttgcacttgacgtaaacggcaaatactcttagtgagtaaatgtttgccgtggtggcaaggtgttagaacaacagagaatataatgatgcaggatttgcgtctgatattaatcattgttggcgcgatcgccataatcgctttactggtacatggtttctggaccagccgtaaagagcgttcctctatgtttcgcgatcgtccactgaagcgcatgaagtccagtcgtgacgacgatgacgttgaagacgacatcgacggtcctgacgacgacggcgtgggtgaagttcgtgttcatcgggtcaatactgcgcccggcgcagcgcatggagagcatgaagccccccgcgctccgcagcaccagtatcaaccaccgtatgcttctgcccagccgcgccagccagcgccgccgccagtggaagaacctgttcgtcatccgccgcagcagcctgtgcaacagcagcccgttgcgccacagcctgtacagccgcaacctgtgcaacagcctgcacagccagtgcatcagccacagcctgttcagcagccgcagccggtacaacaaccgcagccgcagcctgaaccgcctgcgccacagcccgctccgcgcgttgagccagagccggtcgcagagccagaaccggttgttgaaaagccgcagcgtaaagaagcagtgatcatcatgaacgtggctgctcatcatggcacccatctgaacggtgacgtgctgcttaacagcatccaacaggcaggcttcaagttcggcgacatgaatattttccatcgccacctgagtcctgacggtagcggtccggcgctgtttagcctggccaatatggtcaatccaggcacgtttgacccggaaatgaccggtgatttcgtcacgccgggggttacgatctttatgcaggtgccgtcctacggtgacgagctgcaaaactttaagctgatgctacagtccgctcagcacatcgccgacgaagtgggcggtgtggtgctcgacgatcagcgtcgaatgatgacgccgcagaaactgcgcgagtatcaggaccgcatccgcgaagttaaggaagcgaacgcgtaatcgtcgcgttaacttcacctcctcctcaacccccgcctgtcgggggtttttctcattgatggtgcgatatggactcaattgaacaacaacttactgaactgcgaaccacgcttcgccatcatgaatatctctatcatgttatggacgcaccggaagtgccggatgcggaatatgaccgcctgatgcgtgaactgcgcgagctggaagcgcagcaccccgaactgattacgcccgattccccaacgcagcgcgtcggcgcggaaccgctgggcgctttcagccaggtgcgacatgaagtgccgatgctgtcgctggataacgtgtttgatgaagagagttttctggctttcaacaagcgtgtgcaggatcgcctgaagagcatcgacaatctgagctggtgctgcgagctaaagctggatggtctggccgttagcattctttatgagaacggcgtgatggtgcgtgccgcaacgcgcggcgacggcactaccggggaagacatcaccactaatgtgcgcactattcgtgcgatcccgctgaaactgcgtggcgataacattcccgcccggctggaagtgcgcggggaagtgttccttccgcaggcgggcttcgagaagatcaacgaagaagcgcgtcgtaccggtgggaaagtgtttgcaaacccgcgtaacgcggcggcaggttcgctgcgtcagctcgatccacgaatcaccgcgaagcgaccgcttactttcttctgctacggcgtcgggatcctggaaggcggtgacctgccagatacccacctgggtcgcttaatgcagttnnnnnnnnnnnnnnnnnnnnnnnnnnnnnnnnnnnnnnnnnnnnnnnnnnnnnnnnnnnnnnnnnnnnnnnnnnnnnnnnnnnnnnnnnnnnnnnnnnnnnnnnnnnnnnnnnnnnnnnnnnnnnnnnnnnnnnnnnnnnnnnnnnnnnnnnnnnnnnnnnnnnnnnnnnnnnnnnnnnnnnnnnnnnnnnnnnnnnnnnnnnnnnnnnnnnnnnnnnnnnnnnnnnnnnnnnnnnnnnnnnnnnnnnnnnnnnnnnnnnnnnnnnnnnnnnnnnnnnnnnnnnnnnnnnnnnnnnnnnnnnnnnnnnnnnnnnnnnncaaccgcgtgcagctctgcgactctccggaggcggtgctggcgttctatcacaaggttgaagaagatcgtcccacgctcgggtttgatattgatggcgtggtgatcaaggttaactcgctggcgttgcaggaacagttaggatttgtggcccgtgcgccgcgctgggcggtagcctttaagttcccggcgcaggagcagatgaccttcgttcgcgacgtggagtttcaggtagggcgtacgggggcgattacgcctgtggcgcgtctggagcctgtgcaggtggctggcgtgctggtaagtaacgccacgctgcataacgccgatgaaattgcccgcctgggcctgcgcattggtgacaaagtggtgattcgccgcgcgggtgatgtgatcccacaggtggttaacgttgttgagtctgaacgtcctgccgatacccgtgccatcgagtttccagcccactgtccggtatgtggttcggacgttgagcgcgtggaaggtgaagcggtaacgcgctgtacgggcgggttaatctgcggcgcgcagcgtaaagagtccctaaagcactttgtctcccgccgggcgatggacgtggacggaatgggtgacaagattatcgaccagttagttgagaaagagtacgtccatacgccagcggacctctttaccctgacggcaggtaagctgaccggtcttgatcgtatggggccaaaatctgcccagaacatcgttaacgcgctcgaggcggccaaaaacaccacctttgcccgtttcctttacgcgctcggcattcgtgaagtcggcgaggcgacagcggcagggctggcggcgtatttcggcacgctggacgcgctggagaaagccaccatcgacgagctacagaaagtccctgatgtcggcattgtggtcgctacccatgttttcaacttcttcgccgaagagagcaaccgtgaagtgatcggtaaattactggaacagggcattcactggcctgcaccggtagtggttaatgccgaagagatcgacagcccgtttgccggtaaaacggtggtgctgaccggcagcctgagccagctctcgcgcgatgacgcgaaagcgcgcctggtggcgctgggggcaaaagtggcgggaagcgtatcgaagaaaaccgacctggtgattgccggggaagcggccggttcgaagctggcaaaagcgcaggagcttggcatcgaggtgatcgatgaagcggaaatgatgcgcctgttaggagagtgacgtggaaaaagagcagctcgttgagatcgccaatacggagatgccgttcggtaaatataagggccgcaggctgattgatttaccggaagagtatctgctgtggtttgcccgtaaggatgaattccccgccgggcgtctgggcgagctgatggctatcacgttactgatcaaaacggaggggctgacccagctggttcagcccctgaaacgtccttaaactttcgcggcgcgggtctcttcctgcgccagcttttccgtctgcgccttgtaacgccgcgccagtactgcacataccatcagctggatctgatggaaaatcatcagcggcaacaccatcatcccaatgacggacgtcgggaacagaatattggccattgggatcccgttggcgaggctctttttcgatccgcaaaatacaatggtgatttcatcggctttattgaagccgcatttgcgggccacaaagacgttaaccgcgatgacaatggccagcagaacgatgcttaccaccacaataaacagcagcgatccagcgcccaccctgtgccagatgccgttcaccacggcttcgctgaaggccgtgtaaaccaccagcagaattgagctttggtccgttttcccgatccattttttatgtttcgccacaaacgccccaatccagggacgggataagtgtccgagcacaaacggcagcagcagttgcagacaaattttacccacctgctccagattgccttccgcaccgtgcatgttcatcagcagaccgaccagcagcggtgaaacaaagatccccagcaggctggaagcggaagcagaacagaccgccgccgcgacgttaccgcccgccagcgaggtaaaggcaatagcggactgcacggtggccggtaaaatgcacagataaaggaaaccggtatacagcgccggatcgacattcaccggcgcccaccaggcgaacagcacgcccagaaccgggaaaaggataaaggtgctgcacattacccacaggtgcagtcgccagtggctaccgcctgcaataatggcttcccgggagagtttggcgccatgcataaagaacagaagggcaatggctgccgtggtcagcccttcaataaccggaacgaaactgccccgcgccgggaagaacgaggccagcaagacgacaccaatcagggtcagcgtaaacggatcaaggatacgaaaaagtttcataatcactcctgaaaacagatgccgctattgtgctttcttccctttgagaaataaaattgatttattgcatccattcatgaattaaacagatgaattattcgttacgtcagcttcgcgttttcgtcaccgtcgcgcaggcccgcagctttagccgggcaggggagatgattggcctcagccagtcggcggtgagccatagcgtgaaagagctggaaacgcaaaccggcgtgaagctgctcgaccgcacgacgcgagaagtggtgctcaccgaagcgggacagcagctggcaacgcgtctggagaggctgctggatgaactgaacagtacgctcagggatgttggccggctcggacaacagctttccggcaccgtgagagtggcggcgagccagacgatttcagcgcatcttattccccagtgcatcgctgaaagtaatcaccgctatccggatatcgattttgttttgcatgacaggccgcagcagtgggttctggagagtatccgtcagggggatgtggattttggcatcgttattgatcccggagcggtaagcgacctggaatgtgaagtggtgctctcggagccctttttattgctctgccgcgatgatgatccgctggcatcgctgccacacgtggcctggcaggccttgcagggggcaaacctggtgttacaggattatgcatcaggcagccgtccgctgatagatgccgctctggccgcgcagggcgttaaggcaaccattgtgcaggagattgggcatcctgccacgctcttcccgatggtcgaagcggggattggcatcagcgttctgccggcgctggcgctgccactgccgcaggggagtcgtttaacggtgaagcgtttcgtaccctgtgtcgaacgccagctgatgctggtacgccgtaaaaacaggtcactttccggcgcggcgcatgcctgctgggatgtggtgcgtatgcaggccgaacgtttgatggaggcccgcacacgcgatccactttttaacgaaaccaataatcagatgtagatattaatctgatgctccgcggagggcttattgatgccttccgcgactgcctgacctttttcctgttttggcatcgcctcttctgcctgctgacgctgcaattgcgccagctgtgcctgcaacatagccagctgagattcgagtaattcctgctgcttttgcttctcttctgctgtggcatcacccatggccacttctttgagctgctgagtgactttcgttatctgtttggtcagacgggtgatttgagaagcaatgtcgtttccgccggagctgttatctacgctgccgatttccatcgccgacagagaaacgggcttaagagttgtcatattgagatccttttcgccataaaatagaggtatcggcaaagaaggcgtgagcttgagtaaaacaagcggtctggctgcaatggggatgtgctatatcgcagatagcaaaaaagcgcctttagggcgcttttttacattggtgggtcgtgcaggattcgaacctgcgaccaattgattaaaagtcaactgctctaccaactgagctaacgacccgaaatggtgggcgatgacgggctcgaaccgccgaccccctccgtgtaaaggagatgctctaccaactgagctaatcgcccatttcggaactgctgcgataaggtgagaatggtgggcgatgacgggctcgaaccgccgaccccctccgtgtaaaggagatgctctaccaactgagctaatcgcccaatctcaatgcttatctacactgcgagtctaccgaagtagatggtgggtgatgacgggctcgaaccgccgaccccctccgtgtaaaggagatgctctaccaactgagctaatcacccccgctgtgtggagtcgcattatagggagagttgaaaatgagtcaacgcattttctaaagtttttattcgttcgtcgtaaaattagtcaaaacgatcgcaaaacggactgtggcgcatgatttataaacaaaaacagcaatctcgaactggataaagtgatcgacattgaggaatcggcccacagtgatagaatattgcccattgttttcttcccggaatttgccgattaccggcatctttataacgtaaggccatttcatgaaaatcaaaactcgcttcgcgccgagcccgacaggctatctgcatgtcggtggtgcacgtaccgctctctactcctggcttttcgcacgtcacaacaacggtgagtttgtgctgcgtattgaagacaccgatctggagcgctcaacgccggaagcaattgaagccattatggatgggatgaactggctgaatctggcgtgggacgaaggcccatacttccagaccaaacgttttgaccgctataacgccgtaattgacgagatgctggtggcaggcacggcctataagtgctactgctccagggagcgtctggatgcgctgcgcgaagagcaaatggcaaaaggcgaaaaaccgcgttatgacggtcgttgccgccatgaccacagcgagcatgctgcggatgagccttgcgtagtgcgttttgctaacccacaggatggctctgttatctttgatgaccagatccgtggtccgatcgaattcagcaaccaggagctggatgaccttatcattcgtcgtactgacggatcgccaacctataacttctgcgtagttgtggacgactgggatatggaaatcactcacgtgatccgtggtgaagaccatatcaataacaccccgcgtcagatcaacattctgaaagcgctgaacgcgcctgtaccggtgtatgcgcacgtatcaatgatcaacggtgacgacggtaaaaagctgtccaaacgtcatggcgcggtgagcgtgatgcagtaccgtgatgacggctatctgccggaagcgctgctgaactacctggtgcgtctgggctgggctcatggtgaccaggagatcttcagccgcgaagagatgatcgagctgttctctctgaactctgtcagcaaatcagccagcgcgttcaacactgacaaactgctgtggctgaaccatcactacatcaataccatgcagccagaatatgtggcgacttatctgcaatggcacattgaacaggcaaacatcgatacccgtacgggccctgaactggcggatctggtgaagctgcttggcgagcgttgcaaaacgctgaaagaaattgctgaaagctgccgttacttctatgaagagtttgacgcgttcgacgccgacgcggccaagaaacacctgcgtccggttgcgcgtcagccgctggaagtggtgcgtgataaactcgaagccattaccgaatggactgcggaaaatgttcaccacgcgattcaggctaccgctgatgagctggaaattggcatgggtaaagtcggtatgccgctgcgcgttgcggtgacgggggcaggccagtctccggcgctggacgtgaccgttcatgctatcggcaaatcacgtagcgttgcgcgtatcaacaaagcgctgggctttattgctgagcgtgaaagccagcagtaatactcatgtaatacaaaaaacggcagggtaacctgccgttttttattgtcctgttattctagcaatnnnnnnnnnnnnnnnnnnnnnnnnnnnnnnnnnnnnnnnnnnnnnnnnnnnnnnnnnnnnnnnnnnnnnnnnnnnnnnnnnnnnnnnnnnnnnnnnnnnnnnnnnnnnnnnnnnnnnnnnnnnnnnnnnnnnnnnnnnnnnnnnnnnnnnnnnnnnnnnnnnnnnnnnnnnnnnnnnnnnnnnnnnnnnnnnnnnnnnnnnnnnnnnnnnnnnnnnnnnnnnnnnnnnnnnnnnnnnnnnnnnnnnnnnnnnnnnnnnnnnnnnnnnnnnnnnnnnnnnnnnnnnnnnnnnnnnnnnnnnnnnnnnnnnnnnnnnnnnnnnnnnnnnnnnnnnnnnnnnnnnnnnnnnnnnnnnnnnnnnnnnnnnnnnnnnnnnnnnnnnnnnnnnnnnnnnnnnnnnnnnnnnnnnnnnnnnnnnnnnnnnnnnnnnnntcagcaataccaagacgcgtgagaaaaccctgcaacccttcacgagcgagcaacttgtgcaaacgttcctgttcgacagtcgtcatgttttccagcgagtcgataatttgtggaagcaggctggatgaggttgccacgccgtagtgggaggggctttccgccacatggtaaacagcccgacggttacgaatggcgggaagactaatgatgtgctccttaacgtgcgcatcaatacatatcaccctcgctcttccgccttttacaccgttgataccctccgttttccatcctttctgtcgtatccagcgattaacggtttgtcgggctacgcccagactgtccgccagctcttccgtggtcattttgctgcgtaatcttttcatatcagcgttggtcgcgaatccctaaacgttgtaacaagccggtaatcccttcccgcagtaacagcgatgtcatctgcttttgctcttccggcgtcatttcattcgccagcgtcaggagcagggcatgaagcgagccctcgtggtacgccttatctggcagttccggcgtctctgttgccctgcgcgcgctgcgaataaagtcgcgcactttttcattgacgtgtaccagacgcgccttgccaccctgaacgcctggctttggcgatgtaatccaaccctctttgcgtacccatttattgatggtctgtcggctatagccagtgagcagggctaactcttctggcgtcattcgttccttgatcatacaatttcctgaatatctgtggggttaattagtggttcattttatagcaccgttttacgtgaaaacgtgacaagcttaactcctggctgcgagcaggctcgcaaagtgattcatttgcatgatttttcggcgattgaaaggcggaggctgaatttgccgttgacactctgcggcggaattcatattatgccgcccgtcaacatgacagctttacgacggggctatagctcagctgggagagcgcctgcatggcatgcaggaggtcagcggttcgatcccgcttagctccaccaaactctgaacccaacagagtgcggtaggtaaagtaacatgtggggctatagctcagctgggagagcgcttgcatggcatgcaagaggtcagcggttcgatcccgcttagctccaccaaaatttaaaccctcgtcgcaagacgggggtttttttatatcttgtaaaatattttagactgtttttgttgcaattaacgtcgttttctacacctcacctcaatccaaatcaataaacaagtctataaatagacctgaacttgattcatgtaattaataaacctattatccatgcggtcaatgagacgatggtaaaatagattatccggattaatgaatagaaaaatttacaataatgtaaagatatttatgattgccctagcgctaagcctgattgcgattcctttttctcgttatatctctccacgggccatcgtcagcgaaaatgatgtttatctggcgtggttgcccttaagtgccatgctcgccatcgtgttgttatttggacgacgggcaatcattcctttgctgttaagttttagtattactaatatttataatcttgatttagcaccactacaatctgccgtattattatgttgtcagacgtttaccgtcttcgccgcctgtggcgtcatccgtctggtgctgggcaagcgctggcgacacagcataccgaataagtacattggcatacgtattttctggctcggatttatggtgcctgtgggcatcaaattatcgatgtatctggcgggatatttatttgatttcccggtgacaatctcctcctatttcggcgaaggctctgcaatttataacgttatcgatattcagagtctgatttgtgccgccctgattttcaccatgatgttctattatccgttaagaatgattattaatcctcgctatgcccgaacattctggcggcgaagcgtgaagcccctcttttgtcacaaaaaagcgttatttatcgttgtgtggctgatgctgttgatctcgatgatcgctattttatgcgcgccttttgagtcgcagtttattgcgggttatttgatgtcaatcgttttcattcttttcaccctggggattggtcgtctgagctatgcgctcatctctttattctgggcggcctcggcgctcatgctgttgacctataattataattttcttaatggcgttgaatcgggccactcgctctcctttatcctgtcggtgctaatctctttcgccatctgcctgctttacatgtcgcggatctatcagaaaagtgaatggctgaaacaggggtggcaggagagggcgcttaccgatccgctcaccggtctgcctaacattcgtgcgctggaagtgtttttacagcaccatcccgaggccaaagtctgctgcctgcgcctggataatctcgaattcctgagccgtcactacggcatcctcatgcgtgtacattgtaaaaagatgataaccgcgtcgctgcaaccgttattgcaaaaagacgagaagctcttccagttgccgggcagtgagctggtagtggtcttgctgggtccgggcacggctgaacgtctgcaatatatggttgatcatctgaacagccgtaagattatctggaacaagactgagctcgacatcgagtttggcgcctcctggggtgaagtgccggatggagaaagcctgcatcacacgctgggtcagctgagctggctctccgagcagtcctgtgccgggcacaacgtcctggcgttaaccaacagtctggatgatgtctccggtcagacgacggacagagtgctgatgctggcccgcataaaacgcgcccttgatatcggtgggcttcacctttacgcccagccaatccataacgcgcgtggggaagggtactttgaaatcctctcaaggcttgaaagcgagggtgagatcatcacgcctgatcgctttattccgctgattgctcagtttaacctgagccaccgatttgacctgaacgtggtggaaaaattgctgatgtggatgcgcagccatccgtccgaacgggccggaacgcggttctccgttaatctgatgccgcttacgctgatgcaaaatgagatagcggctgagatcatcgcgctttttgaacgctacgccattgcgccgcaagatatcgtcattgagatcaccgaggaacaggctttctctgactcgggaagcagcatcaacaatatccagcagctgcgggattacggcttccggattgctattgatgactttggtaccggctatgccaactttgagcgcctgaagcggctggaggccgatatcattaagatcgatggctgcttcgtgaaagatatctgcaccgacagcatggatgcgatgatcgtgcagtccatttgcaacatggccaaaacgaaatcgctttgtgtggtggctgaatatgtggaatcggctgaacaacgcgagatgttgctgcgattcggcgtggactatttgcagggctatttgattggtaaaccactgcccctgacggcgctggaggcataaaaaaaccgggagcgaggactcccggtttttattacgcggtatgaattacagaaccagtgctgcgatagaggcagacaggacgctcaccagcgttgaaccgtaaaccagcttcaggccaaagcgagaaacgacgttaccttgctcttcgttcagtcctttaatcgcaccagcgataataccgatggaagagaagttcgcgaaggagaccaggaagacggacaggatcccttccgcacgaggggagagtgtgctggcaatcttctggagatccatcatcgccacgaactcattggaaaccagtttcgttgccatgatactgcccacctgcaacgcttcgtgagcgggcacgcccatcacccaggcaatcgggtagaagatgtagcccagaataccctggaaggagataccgagtacggccgcaaacagggcgttcagcgcagcgatcagcgcgataaagccaatcagcatcgcggcgacgataattgcaaccttgaaacccgccagaatgtattcacccagcatttcgaagaagctctgtccttcatgcaggtttgacatctgaatgttctcttcgctggcatcaacacggtacgggttaatcagcgaaagcacgataaaggtgctgaacatgttcagaaccagcgccgcaactacgtattttggttccagcatggtcatatacgcgcccacgatagacatggaaacggtagacattgcggttgccgccatggtgtacatgcggttacgggacatcttgccgagaatatctttatacgcaatgaagttctcagactgacccaggatcagcgagctgactgcgttaaaggattccagtttgcccatgccgttgactttcgataacaggaagccgatcgcacggataaccaccggcagaacgcggatgtgctgaaggataccgatcagggcagagatgaagacgatagggcagagcaccttcaggaagaagaaggccagaccctgatcgttcatgctgccaaagacgaagtttgtcccttcgttggcaaatccgagcagtttttcgaacatttcggagaagcctttcacgaagcccaggcctacgttggagttcaggaagaaccacgcaagtaaaacttcaatgaccagcagttggacaacatagcgaatacgaatttttttgcggtctgtgctgaccagcaatgcaagtgcagtaacgacaacgagtgccaggacaaaatgaaggacgcggtccatatttgctccaaatatgaggcaggtttaatttccgtgcacattctatgtaacaagcacaaagaaaacgagatcaagcccacactatagttacatcctgtgacgagtctcaaaaatagtgatcaacaagacatttttgttatgttaggtaaatgagtgaaaagttaagtttgtgtgctacgcttcacaaatgtctgcgcattttcacattctgtgaccttgctccacctgcctgtctatcgttcctgactatcagagaaatcatgttaaccgttacaaatgaacttgataatcattctcattttgatagcataaaacatagcaaaggctatatttccagaggcagaaatgacgaatagtcgcgtagagagtagcagcggcagagcggcacgcaagctgcggttcgcattaatgggaccggcattcattgccgcgattggctacatcgatccgggtaattttgcgaccaatattcaggccggggccagtttcggctataaactgctgtgggttgtggtctgggccaatctgatggcgatgctgattcagatgctctccgcgaagctgggtattgctaccggaaaaaacctggcggagcaaatccgcgatcattatccacgtccggcagtttggttttactgggttcaggcagaaattatcgccatggccaccgatctcgccgagtttatcggggcggcgatcggctttaagcttatcctgggcgtctccctgcttcagggggccgtgctgaccggtatcgccactttcctgattctgatgctccagcggcggggacaaaaaccgctggagaaagtcatcggcggcctgctgctgttcgtcgctgccgcctatattgttgagctgattttctcccannnnnnnnnnnnnnnnnnnnnnnnnnnnnnnnnnnnnnnnnnnnnnnnnnnnnnnnnnnnnnnnnnnnnnnnnnnnnnnnnnnnnnnnnnnnnnnnnnnnnnnnnnnnnnnnnnnnnnnnnnnnnnnnnnnnnnnnnnnnnnnnnnnnnnnnnnnnnnnnnnnnnnnnnnnnnnnnnnnnnnnnnnnnnnnnnnnnnnnnnnnnnnnnnnnnnnnnnnnnnnnnnnnnnnnnnnnnnnnnnnnnnnnnnnnnnnnnnnnnnnnnnnnnnnnnnnnnnnnnnnnnnnnnnnnnnnnnnnnnnnnnnnnnnnnnnnnnnnnnnnnnnnnnnnnnnnnnnnnnnnnnnnnnnnnnnnnnnnnnnnnnnnnnnnnnnnnnnnnnnnnnnnnnnnnnnnnnnnnnnnnnnnnnnnnnnnnnnnnnnnnnnnnnnnnnnnccgtttttctggctgccggggtgctgggggcgaccatcatgccgcacgtcatttatctgcactcttcattaacccagaatctgcatggcgggacgagtaaagagcgctactccgcctcgaaatgggatgtgactatcgcgatgaccattgccggatttgtgaatctggcgatgatggcgaccgccgccgctgcgttccactttaacgggcataccggggttgccgatctcgaccaggcttacctgacgctggagccgttgctgagtcatgccgctgccactatttttggtttaagcctggttgctgcgggtctttcatctacggttgtggggacactggccgggcaggtggtgatgcaggggttcgtacgtttccatattccgctgtgggttcgccgctcggtcacgatgctgccttcctttgttgtgatcctgatggggctggatccgacccgcattctggtgatgagtcaggtactgctaagtttcgggattgcgctggcgctggtgccactgctgatcttcaccagtaataaatcgctgatgggcgaactggtgaattcgacgtgggtgaagcgcgccgggtgggccattgtggtcgtggtggtggcgttaaacttgtggttgctgataggcacagccgcaggcctgtaaaagaaaaaggagccggaaggctcctttttgttgttaatggtgatggccgtgaccgtggcctctgccttttccatgaccccagccgccacggcggtcgtcacgatcgttccagccttcgcggtagccgcgttcgtaagccttacgcttatcccagccacggtgatagccgttatcgtgtttccaccagcggttttgacgccattcataatggcgatgccagtagtcacggtcgcgccagtagccaccgtcccagtatctgccgtagtcatcacgatcgccaatttgtaatttaatcgatggcaacagggtgatttcgcccgcactggcgaccagcggggccgaagccagtaataccgctgcaagaatcagtgacctgaacatactcttctccttcacgatcggggccgctgtgcgacctgttaacgcaattttacgagttggtaaacattcgtttcatcgcctcaactcctaaatcatgaacgagagcactttttgctaaaagtgtttttaatctgaactggacaggatcgtatctatcgtcttcagctcttctgccgtgaaccgacaattctcaagcacgcctgctgcatcttcaatttgtccggtcttgcttgcgccgatgagcacggatgtcaccgcatcgtggcgcaggatccaggccagtgccatttgcgaaagcttttgcccccggttttccgccagcgcattcagcttgcgtaccttttccagctttctgtcggtgatctgctccgggttaaggaacttactgccgcttgctgcgcgagaatccgccgggataccgttcagatagcgatcggtcaactgtccgcccgccaggggggagaaggggatacatcccacccctttatgctgcaacacgtccagcaacccctcttcaggcgcacgttcaaacatggagtacttcggctggtggatcagacatggcgtgcccagatcctccagtatttcaatcgcctgccttgccacttctgccgggtagttggacagaccgatgtacagcgccttgccctggcgcaccacatggtcaagcgctttcatggtttcacgtagcggcgtttgtggatccgggcggtggtgatagaaaatatcgacatactccagccccatacgcctgaggctctggtccaggctggcgatcagatatttacgtgagccccagtcgccgtaaggcccgtcccacatggtgtagcccgctttggtggagatgattagctcatcgcgccagggcaggaaatcctcctgcaaaatgcgcccgaaattacgttcggccgaaccaggaggcgggccgtaattattggcaaggtcaaaatgcgtaatacccaaatcgaaagcacgctgtaaaagttgacggctgttttcgagtaacgtcgcgtcgccaaaattatgccaaagccccagcgagatggcgggaagcttgaggccgctttgtccacagcggcgatattgcattgtctgataacgatttttgtcaggctgataacccattggcgagacctctggcgctggaaagaaacatcagtgtatacgtttacactaacctgaagaaaatgagcatagctcagcttttttcgtaaagcattctttccagaccctgattgtcgccaattctggacacgcttcacgcttatttaatactcagagtgaggtcaacgtcagaaggacacttataatatgcgtaccccctattgcgtcgccgattacctgctggaccgactaacagattgtggtgccgatcatctgtttggcgtgccgggcgactataacctgcaatttctcgatcacgtgatagacagcccggacatctgctgggtgggctgtgccaatgaactgaacgcgtcttacgccgcagacggctatgcccgctgtaagggctttgccgcgctcctgacgacattcggcgttggggagttaagcgccatgaacggtgtggcgggcagctttgccgaacatgttcccgtcctccatattgtgggggccccgggtatggcggcgcagcagcgaggagagttattgcaccatacgttgggtgacggcgagttccgccatttctatcatatgagcgaacccatcaccgttgcacaggcggtgcttaccgaacaaaacgcctgctatgaaattgacagagtcctgaccactatgctgcgggagcgccgtccgggctacctgatgctgcccgctgatgtggcgaaaaaagtcgctacgccccctgtaagcgctctcactgttaaccccccaccggctgattcagcctgcttgcaggcgttccgtgaggctgccgaaaagcgcttgtccacgagcaaacgcaccgcgctgttagcggacttcctcgtactccgccatggtctgcgcacggcccttcagacgtgggtgaaagaggtgccgatggcacacgccaccatgctgatgggcaagggcatttttgacgaacgacagagcggtttttacggcacctacagcggatcggcgagcgccgcgccggtcaaagaggccatcgagggggctgatacggtgctgtgtattggcacgcgctttaccgatacgctcactgccgggtttacccaccagctgacgccagaccagacgatagaggttcagccacacgcgtcccgcgtcggcgacgtctggtttacgggtatcccgatgagggaggccattgaaacgctgacagcgctgtgtaaaacctatgttcgtgatacgcgagcgtcattggatcacagcggcttttcgttcccgactatcgaaggggcgctgactcaggagagcttctggcgtaccctgcaaacgtttatccgccccggagacattattctggctgaccagggaacgtctgctttcggcgctatcgatctgcgtttaccggcggacgtgaactttatcgtccagccgctgtggggatcgattggctacacgctggcggcagcgtttggcgcgcaaacggcgtgtccgaaccgacgcgtgattgtcctgacgggtgacggcgccgcgcagttgaccattcaggagctgggatcgatgctacgcgacaagcagcgcccgattattctggtgcttaacaacgaaggatacacggtggaaagggccatccacgggccggagcagcgctataacgacattgccctttggaactggacgcagatcccgcaggcgctgagcctggcgcctcaggcagagtgctggcgcgtcagcgaagcggaagcgctggcggaggtgctggataaagtggcacaccatgagcggctttcgctgatcgaggtgatgctgccgaaagccgatattccgccgctgctgagcgcgctgaccaaagcgctggaggcgcgcaataacgcctgattacctgtcgtttcgccatcccatcagcatcggtttgcccgccagcaggagccaggcgggcaacatcacgatacagagcagcggcagaagcgtggtatccggcacgacaacggccgccataaacaggctcagccacgcatcgcgcgtgaccaccagtaccagccccagaatggaacaggagacggtaatcgccgcagggacagcgtcaacgtgctcatgcagcatcagccccagcgcgacgccaacaaataccgccgggaagattcgacctcccctgaaaccacaggccgcagcgaccaccagcgccgccagttttaccagcgcgaacagcagataatcggagacgctaaagacctggctgaaggccagctgctgcatctcgtccagacccttaaacagcgtaaccgtcccgccgatggcgcctaaaacgcccagaataaaaccccccatgcccagaatcagcaccggatgcttcagcctgtgcatcaggcgatgcaggcgagggagacaccacaccgcgaccatccccagcgcaatggcgatcgcgacgacgacggcaccgctgaaaatatcggtgagttgcatctggccgtagtgggggatgatgagtgaaaaatggggatggaaaaacaggctggtggtgagggctcccgcagcggcggccattagcggcgcgaagagtttatcccacagcggtacttcatgatcactgctgagcgtttgcgaaaagatgagcgcagccgcgaccggagtgccaaacagcgccccgatggtgcctgctgacgccaggatcgtccagtccagcgcgccaacgcgcggaaaaagacgcgcccccagaaagaccgccagcgcgatattaaccgccataatgggatgttcaggcccgaggcttacgccgcccgcaagaccgataatcagcgcgataataagccccggcagagcagagggagagacaggagcgccaatcaagggttccagtgccgggtccggcccggcatggcccgggctatagcggatcaccagccctacggcaatcccggtcagggtcagcatcatcatgatccagcccggcgagtcaatgctgatgccgagttttaccggaagcgcggtccataaaatcgtttgcagcaccgccgccactttcatgacgacgatgagcaccaggctcgacgccacgccaataatcagcgccgggacagccaataacagcatggttctggctcgcggatggagcatgatgatttccttgtacaaaacggcttaacgttactttgcacaatcagcattgtggcaatagtgcaaaaggtgctgaaacggtaaagttataatgtgacgaagatcgataatccatgggcagtcaccttctggtcgttgttgttatcacgccttgaatttacagtgtcccaaagatttattctgactttagcggagcagtagaagaatgacaaagtatgctttggtaggtgatgtaggcggcaccaacgcgcgccttgccctgtgcgatgtgaacagcggtgaaatttctcaggcgaaaacctattcagggctggattacccaagcctggaagcggtggttcgcgtctatctggaagagcataaagtgagcgttgaagacggttgtatcgctattgcctgtccgatcaccggcgactgggtggcgatgaccaaccacacgtgggccttctcaattgccgaaatgcggaaaaacctcggcttctcgcaccttgaaattatcaacgacttcactgcggtttccatggctatcccaatgcttaaaccagagcatctgattcagttcggcggtacggccccggttgaaggcaaaccgattgccgtttacggcgcaggcaccggcctgggggtggcgcacctggtccacgtcgacaaacgctgggtcagcctgccgggcgagggcggtcacgtggattttgcgccgaacagcgaagaagagggcattattctggaggagctacgcgccgagattgggcacgtgtcggccgagcgggtgctttctggcccgggcctggtgaacctgtatcgggcgattgtaaaatcagacggtcgtctgccggaaaatctgcaacctaaagatgtgaccgaacgcgcgctggccgacagctgtattgactgccgccgtgctttgtcgctgttctgcgtcatcatggggcgttttggcggcaacctggcgctgaaccttggcacctttggcggggtctatattgcgggcgggatcgtaccgcgcttcctcgatttctttaccgcctccggcttccgtggcggcttcgaagacaaaggccgcttcaggagttatgtccaggacattcctgtttacctgattgtccacgacaacccaggcttactgggctccggggcgcatctgcgtcaggtactgggtcagatcctctgatgctcattcccctctcctgcgggagagggaacgcgctacaggtgcatgagctggcggaactctttcaccctgctgcggcttaccggcacctggaaatccagatccttcagccgcaaaatataggtgttattaaaccagggttcgatttcgcggatcttgttcaggttgacgcagaacgagcggtggcagcggaagaagtgagcggccgggagtttattgcagaattcggtgatgttcatcgccattacgtaggattcacgccgcgtatagacaaacgtcattttttcatgcgcttcggcatagtaaatatcgtcgacaggcgtgacgatgatccgttcgtccttcaccagattaatcgtgtcgttttcccgcgctaccgggctggcactggcgggtaatgcttgctgctgccacgcggcttccagcttatgcagcatgctgataatacgcgactcctggtacggcttcagaatatagtcaaacgcctcaagctcgaaggcttccacggcatgctctttccacgcggtgacaaacacaataaacggcttgtgggcgaactgattgatattttgcgccagcaggacgccgtccagcgacggaatattaatatcgaggaatatcgcgtcgacccggttatgctgtaaaaatttcagcacgtccagaccatcctcaaaacagccaacaatctccatctggctgtgggttttgataagccagctcaactcctgttgagccagaaattcatcttctacgatgatgactttcatctgttactccggcctacggcaacaaggatatcggggcattcacgggcgttcgctcattcggaacataaaaggcaatttcggtgcccggctcaagacggtgaatatgcagcccgtcaccgtacagcagtttgacccggtgatgcacattcagcagtccgatcttgttgcccggcatttcgtttgatttgacgcgctcgatgactttcggatcgatgccgtgcccggtatcgcgcacggcgatgcgcacgcggttaccgctttccgtcacgctaatcgttactacgcctttgcctttacacggctgaataccgtgaacaatggcgttttccaccagaggctggatcagcaggcttgggatcacgcagctgacctcttcatcaatatcgtaaatgaccgtgagcttatcgccaaagcgtgcctgctcgatggcgatgtaatccttgatttgatacagctcttttttgatgtcgatctgctcgtcgtcatttagctcaatgttgtagcgcagatagcgcgacagattaaatatcagctgccgcgcggtatccggattcagacggatggaagaggagatagcgttcagcgcgttaaacaggaaatggggattgatcttgctttgcagggcgcgcagctctgccttatttgccatctcgcgcagctgctccgcacgcgaaacctcaagttgggtggagatgatctgcgacaggccaatcgccatctcctggagcgaggaggtgatttggtgcgcatggcagtagtaaattttcagcgtccccgtgaccacgcctttttcccacagcgggatcaccagcatcgagtggatctctggcgttcggtgggcttcatcattgtttttaataatgatttttccgtagttaatcgcctgtctggtggtcgggctgatggtgtcgtcgctgtcgcgataattgtgctcaccgacgccaacgtaagccagcacgtggtcaatattggtgatggcgaccgcatcggcgtgaatatcacggcggatgatgtcgcaaacctgacgtaaagattcggcgttaacgtgccggaaaaggggcagcgtcttgttggcgatgtccagcgccagtttggcctgacgcgcggcgctggcctctttttcgccctccacgctttgcaccagcagcacgataaaaccgatacagacgctcccgaggatcatcggaataccgatcttcgagacgatatccagccccagcgcaacggttggcgcccagacgatgaccaggatcatggtcagcgtttcgcagaccatccccgcgataatccccgcacgccagtgctgctttttcgggattttgcggttaatccagcccgagagcagcccggcaataatgctggtgataaagcaggggacggccgtcacgccgccaatatcaatcaggtaccgatgggtgccggcgataatgcctgtgataatcccgacccagggaccaaagaggatcccgcccgacatgacggcgatgatgcgcacgttcaccagcgagccttctaccggcaccccggaccaggtgctgaacagggcaaacatcgaaaagataaacgtgacggccagcagctcttttggcgaatgggcagatttatgcaacagttcgcggaacaagcggatgcggataaggaaaaagagacagatcagcattaatgccgcgcggtcgaacaccgccaggagcatattgaagatttcgtgcacggtcaggcctgggaaaacgggaaaaatctatgatagaaaacatagggcctgatgaccagctatccatcagatttatcaaatggggaaaaaccataattctcaaaggggattgctggcttttgactgaaagccggtgcttttccgtttggggagaaacgtcaggtaacgatactgaaaatattgtgttaaatcgtagcgcttaaaactgcctgttcacgataagagttccgcttttcactgcaatcgcattcccgttttagcgcaaaatactgttttgccgttatcctctcgacagcgtctttttcttcaggttattttctaagcacgccacacgggtggcagcgtcgctcggacggtccgggcgctaacgtgactctgaggaatctatggctgaattcagtcctgaacgccgttttacgcgtatcgatcgtctccccccttatgttttcaatatcactgctgaactgaaaatggctgcgcgtcggcgcggcgaagacattatcgatttcagtatgggtaaccctgacggcccaacgccgccgcatatcgttgagaaactctgcacggttgcgcagcgtcctgatacccatgggtattccacctcacgcggcattccacgcttacgtcgggcgatctcccgctggtatcaggatcgttatcaggtcgatatcgatcctgaaagtgaagcgattgtgaccattggctccaaagaggggctggcccacctgatgctggcgacgctggatcacggcgataccgtactggtgccgaatccgagctacccgattcacatctatggggcggtgattgccggcgcgcaggtgcgttctgtcccgctggtggaaggcgtcgacttctttaacgagctggaacgggcgattcgtgaaagctatccgaagccgaaaatgatgatcctcggtttcccgtcaaacccaacagcacaatgcgttgaactcgaattcttcgagaaagtggtcgcgctggctaagcgttacgacgtgctggtggtacacgatctcgcctacgccgatatcgtttatgatggctggaaagcgccgtcaattatgcaggtacccggtgcccgcgatgtggcggttgagtttttcaccctgtcgaaaagctacaacatggcgggctggcgaattggttttatggtgggaaacaaaacgctggtgagcgccctggcgcgtattaaaagctaccatgactatggcacctttacgccgttacaggtcgcggccatcgcggcgctggaaggggatcagcaatgcgtgctcgatattgccgctcagtataaacgccgccgtgatgtgctggtaaaagggcttcatgaagcaggctggatggtggaaatgcctaaannnnnnnnnnnnnnnnnnnnnnnnnnnnnnnnnnnnnnnnnnnnnnnnnnnnnnnnnnnnnnnnnnnnnnnnnnnnnnnnnnnnnnnnnnnnnnnnnnnnnnnnnnnnnnnnnnnnnnnnnnnnnnnnnnnnnnnnnnnnnnnnnnnnnnnnnnnnnnnnnnnnnnnnnnnnnnnnnnnnnnnnnnnnnnnnnnnnnnnnnnnnnnnnnnnnnnnnnnnnnnnnnnnnnnnnnnnnnnnnnnnnnnnnnnnnnnnnnnnnnnnnnnnnnnnnnnnnnnnnnnnnnnnnnnnnnnnnnnnnngcctctatgtacgtctgggcgaaaatccctgagccgtatgcggcgatgggttctctggaatttgccaaaaaactgcttcaggacgcgaaggtttgcgtctctccaggcattggctttggtgactacggtgacacgcacgtgcgtttcgcgctgattgaaaacagcgaccgtatccgtcaggcagtgcggggcattaaaagcatgttccgcgcggatggcctgcttgcagcgaagagcgttgcggaacaacccgagtcgtaacggacaacaaaaaaacaggcgccaacggcgcctgtttttttgactgcattttcttaactagatcatcagagcaaacgttccggcccaaactaaaacaataaccgaaatgcccataaagaaatatttcacgtttcatcgctccgcgtatcttccggtacgcattaaaaaaacagagtccaactgagtatagagagttgaaatcatgcgaaaggggaaatcggaattatcccgttacgtcgctaacttcagctctgaattctgtgctttcctgtcgccagacggcgctaatgtacgcctaaatttcaggagtgacaagaggcatttttttaaataatttcctacacttacgagtgtcgtggaacggcgacagtttgatttcggtacgcaataaatgcctgttgagcgacggtcaaagaaaaccgttacgcactgcgattacaggtgtttgaaaaggttagtttcttagcgaaactaaccttcgaaaggggtcagatatagagcgaggcttcgcccagggggcgggttttaaagcggcggtgcatccacagatactgctcaggcgcacgcataatttcaaactcaatcaccttattgataaaggtcgcggcttcactctcatcttcaggatagttcgccatctctggggagatatgcagacgatagcctgacttatccgcttttctgaccatggtcaccgtcaacatcgcggcgcctgagagacgtgaaatcacaaaggtaccgttcgtcgtagcgacatctttaaccgcaaagaaaggggcaaaactgctgcctttaggaccgtagtcctgatccggggcaaaccagacggcttcaccttttttcagggcgccaaccataccgcggagattgttacggctgatcatcgccttatttgaacgcatgcggccccgcgtttgtacccattccatcagcgcgctgttatgcgggcgataggttgccatcattggctgacaaagacccataacgcggccgcccagctcaagcgacataaaatgcacacccacaaccatcacgccgcggttttgcatctgggcacgtttcaggttatccaggccttccacgtcaaaccatttacggacacgctcgtctggccagaaccaggccataccggtttcaagcagcgccataccgatagatttaaagttttccgcaatcagcgtttcgcgctgctgggcattgtaatgcggaaagcaaagttcgagattttttcgggcaatggactcacgacgcttaaggaagtgacgcgatgcgctaccgagcttagaacccaggaaacggatcacgggataaggaagttgaaccagcagccaaagcacgccaaggccgaaccatgtaaaccagtagcgcgggtgcagaaacgcccgctgaaatttggattgagacaaaatagtggaacctatgtgaagcctgtgaaggtagcgcagacttcgcgataccacgtgccattgagaccgtaggacgaggtcatggttgcaggctttaccgttctttacgacgttgcctggccattgctgacttgggtgggcggcataatgtagcaccgttatacattatgagctatcactcgtttttgtttaaaaaagcggcaattgcggagtggtttgattttgctattgttaaatctgcgttcccgcatgtctcctgaaggtgcagaccatggaaacctacctgcaaacggtgaaagaagagtgggtgaagctgattaatgaaaccgatcccgatgtgcatcggcttgcgactgagcttgccagagacaacgcaacgcccctggtcgctgaattctatcgtgttgtgctggcagatccgtcggcagctgaattcctgaccaccgaacaggtggagaggcagcttcaggaggcgcttcgtcgctggcttattgatgtgctctcatgccgtgtggatcaggttgaagagcagatgcgggcgcagcagcgcgctgcggatgttcatgcccgtattggtatttcggttgatttagttgaaatgggcttccgtgttctgaaaaagctgctgttacctgtcattactaccagcgcccattcgcctgaggtgaagctgcatatttatcactacgcgataaacagtatcgatctggccatggaagtgatgtcgcgggcctatgtatttagcgagaacaatgcggcgaaagaggacgaaaattatcgcatcttttccttaatggagaacgcagaagaggagaaggagagacagaccgcggcgctgctgtcatgggaaatggtgcttctgtataagatcacgcttaattccagtatcggcaacagtctgccgctggggcagtctgaatttggactgtggtttagccataaaggtcggcactatttcagcggcatcgctgaggccggtcatatctctcgtctgattcaggaattcgatgacctttttgacgaggtccgtcttgcagggcagggtctgagtgataaagcgcagcgggataaattcttgcagcgaatgcgtaataccctctcgcaaatcatcacgcttttgcgcgaactgtttgacgaagtgtcgcgacacgaggtgggggttgatgtcctgacccgcctgttgaatcgccgtttcctgccaaccatcttcaaacgcgaaatcctgcacgccacccgggcgggaacaaagctctcgacgctgctgattgacgtcgacaaatttaaacaaatcaacgatacctgggggcacaataccggggacgagatcctgcgaaaagtctccggcgcgttctacgacaacgtgcgaacctgtgattacgtttttcgctacggcggcgatgaatttctgattgtgctaacggaaatctcagaggtggacgcgctgcgaattgccgagcgtatccgcaggcgggtggaaaaaatcaaggttaactccccaaccggcgatattatcccgctctccctctcgataggcgttgcgatgttcaacgggcatcccgattacgagcgattgattcaggcggcggatgaagccttatacggcgcgaaacggcgtggccgaaactgcgtggagctttggaagggggcgtaaggaaagacagaagtgtcccctgcaggaatcgaacctgcaactagcccttaggaggggctcgttatatccatttaactaaggggacgaagcggcaagagtatagcgttatttacacttttcgttaagcgcattgccgcctgactggtcaaagagtcaccgttcacgccgatttttcggcagttttatcctttttttcctgagccttaagctcggccttacgcttgttggacatgtcgttacggatttgcgcatggctcagcagcgcaaagataaaggtcccgccacaaatgttgcctgcgagggtaggcagggcgaacggccagaaaaagtcgctccagtggagtgtgccgttaaataccagataaaggatttcaacagttccgacaacaatgtgtgtggtatcggcgagtgcgataagccaggtcatcaggataattaccacgattttcgcgctacccgctgacgggaacatccagaccatagtggcgatgatccagccggaaattatggcattagagaacatttcaaccggcgtgtttttcatcacatccatgccaattttcacaaatgcgtcgcgggtcggttcatcaaatattggcatatactcgaatgcccaggcggctatgcccgtaccgatcaggttccccagcagcacgacgctccacaggcgcatcagtaaaccgaaattaccgagggtcggattttgcatgacgggcagtacggcagtgacggtattctccgtaaaaagctgctgtcgcgccataatgacgataataaagccgaacgtgtagcctaaattttcaagcaaaaacccgcccggtacgccttccagctgaacgtgaaatatccctttggcgagcagagaggcacccatcgacagaccggctgcaatggctgaccacagcagggccatcgcgtcgcgctccatctctttttccccgtcctggcgaatatgctcatgaatagccatggcgcgcgacggcaggcgctcttcatcgacttctatctcttctccccggtctttctcctcgctttcaatctcatgttcctctttgctttcaccaattttctcttcgctaatgtctttcataacagctccttcggggtaattgctcatttaagcgtagcggcttttagcgctttccccgtggggatgctcttaaattgctgaaaatggcaataaaggtgagacatctctttcaaagccaatataaaattgccagcgaaacgaattccgaaagacaggctatgctgaaattagcgtgatgacgcgagcgggtcgacattgtcctcgtagacatcggtaagcgtgctgttacaatcacttgcacgtttcaggcggagcatcaccggctccgtcacagatggcattcaacgatagccatattgaacagggagaaatttatgaagcttcggctgtcggcgcttgcgctgggcgtaacaatgcttgtgggctgcgccagctctggcgagcaaacgggacgctccgatcctctcgaaggatttaaccgttcaatgtacagctttaactataatgtgctggatccatatctggttcgtccggttgccgtggcatggcgtgactatgttccgcagccggcgcgtaacgggctgagcaactttaccagtaacctggaagagccagcggttatggtcaactacttccttcagggcgacccgtatcaggggatggtgcatttcacccgcttcttcctgaactccctgctgggtatgggcggcttaattgatgtcgcaggcatggcgaacccgaaattacagcgtgaacagccgcaccgtttcggcagcacgctgggtcattatggcgtaggttatggtccgtatgtgcacctgccattctacggcagctttaccgtgcgtgatgatggcggcgacatggtggatacgctgtatcctgtactgtcatggctcacctggccgctgtcgattggtaaatggaccgtggaaggaattgaaacgcgtgcgcaactgctggattctgatggtctgctgcgtcagtcttccgatccgtacatcatggtgcgcgaggcctacttccagaaccatgactttattgccaacggcggtaagctgaagccggaagataatccgaacgcgaaagccatcgagaacgaattaaaagatatcgattcggaataaaaaaaaggtgagcaatgctcaccttttttaatcgtgttgggattagaacgcgtagttgaagttggtaccaaacagccaggctttaccttcagaggaaaactcgtacgggccttcctggaaggtcaccttctggccatgcatgtacgacacgcccgcgtcgatagaggcattctcgttgaacgcgtaggttgcccccgcactcacccagaaacggtcctgatccggaatggagatagaacgtttatcggccggtaccgggctgtcatcaaatgccacgccggtacggaacgtccagttgtcatccatataataggtcgtaccaagcgcgatacggtaagcatcgtggaagctttcgtctttatagaacagcgtctggccgttgctgccggtggctttaagctcctcgaactggctccagctggtatacgcgaggctgtagtgaattgcccactgcggcgcaacgcggttataacctgacacttcccacatttctggcagatgcagcgacagtgaacccggtacggtttgattcgaggtaccccatggaatggtggtgcccgcgcctgggaccataccgttgactgggctcaggatgccgcttttgtaatcgccatcgaaatcaattttcacttctgagcgataggtcagaccccagcggttgtttttatccagttcatacaggataccggcgttccagccgtaaccccattcatcacctttcaggctggcaattttattgctgtttttcggcagtgcagcagtttgctccccggagtaacgctcgatttttgcatcggcgtagacagcatcaaagcccagaccaaagctccagttatcgttcagacgatatgcgccgctcaggttgaggttcagggtcgtcaggtcggttttaccgccgtattccccggccggatagttgttattgaactccgttgccaggccatagttagaggtgacagaggcaccccaaccaaactgttcattgattggcgcaacaaagtgcaggttaggcacccacgcggtcggcgcaatgttatccgccttcagatctgcgccggtgaactgagatttgccagaaatgttgacatcaggatcgatgtaaaccgcaccggcagagaaggtagggcgatcaaacatcatgatcagtgccgggttacgactcgcgttgcctgcgtcatcggcaatcgcaccttccccggaatacgcacggccaaggccagaggaagaaaattcgtttaactggaagcccgctgaccaggcggacgttgagacgattgccactgcaactgctaaagcagtttgtttgaacagggttttctggctcatgaccataacctcattgagttatttttattcaataattgttacataccgtaacaggagcgcgaagtgtagggtctgaggtatgacttacaaatcagaccagtggcgagagtataggtctgaccagctgggatgttgcaagtttgtttattaatattttcagatatgtttcttgaaacgagatctggttggcaaaattgtgaccagtgcgattcctctgaaaaggggaattttgttttagatcattttttagtgtgatattgctcacttatccgattttgcgccattaacggctggagggggctcctccgggggcgtaaaatagacgcatcgtgtttatctcgcgccctgcgcgaatacagaggaaattgagctatgagtaaatgcagtgctgatgaaaccccggtttgctgctgtatggatgttggcaccattatggacaacaccgattgcaccgcctcttacagccgcgtattccctaaccgcgctgaagcggaagagacgctggccgcgctgagccagcacgcgcgtgaagtcgaatccgatccgtgtgaaatcaaatccaccttcacggaagtggaaggcggcgtgcggctggatatcgactttgtgttcgcctgcgaagcagaaacgctgatcttccagctgggcctgcgttaatactttttgcacgggcctatgagcgtgtaggccgggtaaggcaacgccgcaacccggcaacaaatctcacaaatgcctctgccatgcaggggcattttctttttcttctctgtgccttagctcgcaatttttcgcttccccgattggctcaatgtaaaaaaatagttaagactattatcaggtcagaccacttaatgtgtgcgcaaaatttttttacaggggagtgttatgagtcaggcattaccgcttatcacccgacacggtgaccgcattgccattgtcagcgggttacgtacgccgtttgcgcgtcaggcaaccgcgtttcacggtataccggctgtcgatctgggaaaaatggtggtgggggagatgctggctcgcagcgagatcccgccagaggttattgagcaactggttttcggccaggtggtgcaaatgccggaagcgcccaatatcgcacgtgaaatcgtgctgggcaccggcatgaatgttcacaccgacgcttacagcgtcagccgcgcctgcgccaccagtttccaggcggtggcgaacgtggcggaaagcctgatggcggggaccattcgcgcggggatcgccggcggcgcggattcctcatccgtgctgcccatcggtgttagcaaacagctggcccgcatcctcgtggatgccaacaaagcccggaccaccggtgcgaagctcaaactcttctcgcgtttacgtctgcgcgacctcatgcccgtgccacctgccgttgctgaatactccaccggcctgcgtatgggcgacactgccgagcagatggcaaaaacctacggtattacccgcgaacagcaggatgcactggcgcatcgctcgcatcagctggcagcgaaagcctggtcggagggcaaactgaccaacgaagtgatgaccgcctatgtgccgccttaccgcgaaccgctcgcggaagataacaacattcgcggcacctccacgctggcggattatgcgaagctgcgcccggcctttgaccgtaaacacggtacggtaaccgcagctaacagtacgccactgacggacggtgccgccgccgtgatcctgatgacggaatcccgggcgaaagagcttggcataacaccgctgggctatttgcgtagctacgcctttaccgccattgatgtcaggcaggacatgctgctcggtccggcctggtccacgccgctggcgctggagcgtgcggggttgacgctggctgacttaaccctgatcgatatgcacgaagcctttgccgcacaaaccctggcaaacattcagctgctggcaagcgagcgcttcgcgcgcgatgtactgggccgcgcccacgcgaccggcgaagtggatcagagtaagtttaacgtgcttggcggatccatcgcctacggccatccatttgcggcgaccggcgcgagaatgataacccagactttgcacgagctgcgtcgccgcggcggcggttttggtctcgttaccgcctgtgcggcgggcggcctgggtgcagcaatggttctggaggctgaataatggaaacgacatctgcatttaatctggctgttcgccttgataacgtggctgttatcaccattgatgtacccgacgaaaagatgaacaccctgaaggccgagttcggcgttcaggtgcgtgcgatgctcagacagatccgcgaaaacaaagcgatacgtggcctggtatttatctcggcaaagccgcataactttattgccggggccgatatcaacatgattgcccgggcgaaaagcgctcaggaagcagaagacctggcccgtcaggggcagcaggtaatggcggagatccatgcgctgtcgatacccgttgtcgctgcgatccacggggcctgcctgggcggtgggcttgagctggcgctggcctgtcacagccgcatttgtaccgacgatgcgaaaaccgtactcggactgccggaggtacagcttggattgctgcccggttcaggtggcacgcagcgcctgccgcgtctcgtaggcgtcagtacggcgctggagatgattttaaccggtaaacagctgcgcgcccgtcaggcgttaaagtcgggtctggttgatgaggtcgttccgcacgccatcttgcttgaagccgctgttgagcgggcgctgaaaggtcgtcaggcgaaacgccctctgccggtgcgcgagcgtatcctcgccgggccgctggggcgcacgctgctgttcaatatggtgggtaaaaaaaccgagcaaaaaaccaaagggaactatccggcagcgacgcgcattctgaaggtgattgaaaccggtttatcgcagggcagcagcagcggttatgctgcggaagcgaaagcctttggcgagctggcgatgacgccgcagtcgcaggcgctgcgcggcattttctttgccagcacggaggttaaaaaagatccgggcagtgaagctgaaccggctccgctgcgtgccgttggcgttctgggtggtgggctgatgggcggcggcatcgcatttgtcaccgccagcaaaggcaaattgcccgtacgtatcaaagatatcaaccctaagggtatcaaccacgcgttgcagtacagctggcagaaccttgatcgcaaagtgaagcgccgccatatcaaggccagtgagcgtgataaaaccctctcgatgatcactggcgccaccgactacagtgggtttgcacaccgcgatctggtgattgaagccgtgttcgaagatctcgcccttaagcagcagatggtggcggacgttgaacagcattgcgcgccgcacactattttcgcgtcaaacacctcgtctttgccgatcggcgacatcgcggcgaaagccgtgcgcccggagcaggtgatagggctgcactatttcagccctgtcgaaaaaatgccgctggtggaggttatcccgcatgccacaaccagcccgcaaactattgccaccgtggtgaaactggcgaaaaaactgggcaaaaccccgattgtggtcgcggacaaagccggcttctacgtcaaccgcattctggcgccgtacattaacgaagcgatgcggttgctgacggaaggggagaaaattgagcacgtcgatgacgccctggtgaagtttggcttccccgtcggcccaatccaacttttggatgaggtaggaattgatacggggactaaaattatccctgtgctggaagcggcttatggcgatcgttttgcgccgcctgcaaactttgtttccgcaattttgaaggacgatcgcaaaggcagaaaaaatgaacgcggtttctatctttacgccgcgaaagggcgtaaaagcaagaaacaggtcgacccttcggtttatgcgcttattcctgtcacgggtcagggaaaactgtcggcggttcagtgtgctgagcgctgcgtgatgatgatgctcaatgaagcggcgcgctgctttggtgagcaggtgatcaaaagcgcgcgcgacggcgatatcggcgccgtgtttggtatcggttttccgccatttcttggcggtccgttccggtatatggataccctcggggcgggtgaagtggttgcgatcctgcaacgtctggcctcgcaatatggtccacggtttacaccttgtgacgaattattgcagatggcggaacggggtcagacattctggcccgcaagggaaactgattgcgtaaactgaagtcaaagaagggtaaatcctgaggtgatggaacctgttctggcgaaattgtaaacagagattgactatacttacgccattgaggtaaaaaacagcgtttcattcaccgaatggatcaggcacaatgcccggccatcgggttttctacctcagagcattaatcgcgggtagttaacgccggtgattctggttaacaaaagcggtgcaatatgcaagtttttatcatgcgtcacggcgacgcggcactcgatgccgccagtgactcagtacgtcctttaaccgtctgtggctgcgacgaatcccgtcagatggcgacatggcttaaaggtcaaaaagtggacattgaacgcgttctggtgagtccgttcctgcgggcagaacagacgctggatgtggtaggagagtgtatgaacctgccatccagtgtggatgttctccctgaactcacgccgtgtggcgatgttggccttgtcagtgcttaccttcaggcgctgtgcaatgaaggtgtcgcttccgcactggtcatttcccacctgccgctggtcggctatctggtatctgagctgtgcccgggcgaaacgccaccgatgttcacaacgtccgccattgccaacgtcaccctcgacgaaaccggcaaaggggtctttaactggcaaatgagtccgtgcaacctgaagatggcaaaagccatctgacgtgacgtgcgatatggcggggtgcagcgtgcctcccgccatcctgtcagggcaattctggcggctgccactcctcgacctcaatcaataccagcaatgcggcatctccgccgtactcttttggcgcctgatgaaaagccatcacgtgtggatgctgagccagccacagcggtgtctgttgcttaagaatatgtttgccgtggccgtgcatcacgcaggcgcaaaaaacatgctcgcgacgacatgccgcgatcaacgcccccagctcctgtttcgcctgcatctgggtcaacccatgcagatcgaggaacagctccggcgagtaatctccccggcgtaattttttcagttcaaaatggctgacgtcttcgcgcacgtatttcaccgcaccctgcgtatttagcagcggctgaaactcatctgaaaaatagtggctgttatcggcctgctcctggagcaaccgtttgaccggtacctcgctgacttttttacgctgcgggcgatggacaatggtgtcgtgcgtgatttgacgcgtcccggtcatcagctggcggaatagagcctgatcctcctcgctgagcgatgttttctttttcattcgtcattctcatctcgtatttccgatagtgtacccgactaaacgcattttttaacctcaagcggtacgcgtcattgctgatttatcgctgtcttcatggcaaactagccgccgaaaattatgcgagcatgccctggaggaaagagtggataaaatttttgtcgatgaagcagtaaacgagctgcataccatacaggacatgttgcgctggtcggttagccgcttcagcgccgccaatatctggtacggacacggtaccgacaatccgtgggatgaggccgtgcagctggtgctgccgtctctctacctgccgctggatattccggaagacatgcgcaccgcgcgcctgacctccagtgaaaaacaccgcatcgttgagcgcgtgatccgtcgcgtaaacgagcgcattccggtggcttacctgaccaacaaagcctggttctgcggccacgaattctacgttgatgagcgcgtgctggtgccgcgttcgccgattggcgagctgatcaacaaccattttgacggcctgattaaccatcagccgcagcacattcttgatatgtgcaccggcagcggctgcatcgccattgcctgcgcgtatgccttcccggaagcggaagtggacgccgtcgatatctccaccgacgcgctggccgtcaccgaacacaacattgaagagcacgggctgattcatcacgtcacgcctatccgctctgacctgttccgcgacctgccgacgctgcaatacgacctgatcgtcaccaatccgccgtacgtggatgcagaagatatgtccgacctgccgaacgagtatcgtcacgagccggagctgggcctggcgtcaggttctgacgggctgaagctgacccgccgcatcctggcgtgcgcgccggattatctgaccgacgacggcgttctgatttgtgaagtgggcaacagcatggtacatctgatagagcagtacccggatgtgccgttcacctggcttgagttcgacaacggcggtgacggcgtctttatgctgaccaaggcgcaactgcttgatgcacgcgaatacttcagcatttacaaagattaatccagcgggcttcggcccgtttcacaacgctcaaacacaaacaacaacatcggagccgtgatggcaggaaacagtattggacaggtattccgtgtgaccacctttggcgagtcgcacggtctggcactgggttgtatcgttgatggcgtcccgccaggcatcgaactgaccgaagccgatttacagcatgaccttgaccgtcgtcgtccgggtacctctcgctacaccacgcagcgtcgcgagccggaccaggtcaaaattctctccggcgtatttgaaggccgtaccacagggaccagcattggtctgctgattgaaaacaccgatcagcgttctcaggactacggcgcgattaaggacgttttccgtcctggtcacgccgactatacctacgaacaaaaatatggctttcgcgactatcgcggcggcgggcgttcttccgcgcgtgaaaccgcgatgcgcgtggcggcaggggcaattgccaaaaaatatctccagcagaaattcggcatcgttatccgcggctgtctgtcccagatgggcgacattccgctggcaatcaaagactgggatcaggtagagctcaacccgttcttctgcgccgatgccgacaagctggacgcgctggatgagctgatgcgtggcctgaaaaaagagggcgactccattggtgcgaaagtcaccgtggtggccgacggcgtgccggctggctggggcgagccggtatttgaccgccttgacgccgacatcgcccacgcgctgatgagcatcaacgcggtgaaaggcgtcgaaatcggcgacggttttgacgtggtcaagcttcgcggcagccagaaccgcgacgaaatcacgaaggcgggtttccagagcaaccatgcgggcggcattctgggcggcatcagcagcgggcagcaaattattgccaatatcgcgctgaaaccaacgtccagcattaccgtcccgggccacacgattaaccgcgctggcgatgaagttgagatgatcaccaaagggcgtcacgatccgtgcgtggggatccgcgcggtgccgatcgcagaagcgatgctggcgatcgtgctgatggatcacttcctgcgccagcgcgcgcagaatgcggatgtgacgaccaccattccacgctggtaactatgaaaaaaactgcaatcgctctgctggcgctgctggccagtggagcaagcctggccgctacgccgtggcagaaaatcacccacccggtagcggggagcgcgcagtccattggcgctttctccaacgggtgtatcgtcggtgcgcaggcgctgccgttgcagtcggatacttatcaggtgatgcgtaccgatcagcgccgttatttcggccatcctgacctgctgctgtttattcagcgtcttggcaaccaggtgcataacctggggctggggacggtgctgattggcgatatggggatgcctgccggtggtcgcttcaacggcggtcacgccagccaccagaccggactggatgtggatatcttcctgcaattgccgaaaacgcgctggagctcagcgcagctgctgaaaccgcaggcgctggatctggtctcggccgacggtaaacgggtcgtcgcctcgcgatggtcgccggaaatttccagcatgattaagctggcggcagaggataacgacgtcacgcggatctttgttaatccggccatcaagcagcagctttgcctggatgcgggaacggatcgcgactggttgcgtaaagtgcgcccttggttccagcaccgggcgcatatgcatgttcgcctgcgctgtccggcgaacagcctggaatgtgaagatcagccgctgccaccgcctggcgatggttgtggttacgaactgcaaagctggtttgaaccagccaagcctggaacctctaagcctgagaagaagacaccgcctccgttgccgccttcctgccaggcgctactggatgagcatgtactttaatggataatttcgtcgatctgttcatggtgtcaccgctgctgctggcggtgctcttttttgttgcgatgttagccggatttatcgatgccctggcgggcggcggcgggttgctcaccgttccggcgctgctggcggcaggcatgagccctgcccaggcgcttgccaccaacaaactccaggcatgcggcggttcgctctcctcgtcgctctatttcatccggcgcaaagtggtgaatctcgccgatcagaagctcaatatcctgatgacgtttattggctcaacggcgggtgcgctgctggtccagcacgtacagtccgacattctgcgccagatcctgccgctgctggttatctgtatcggcctctatttcctgctgatgccaaagctcggggaagaagatcgacagcgtcgtcttcacggcctgccgtttgcgctgattgccggtggctgcgtcggtttttacgatggcttctttggcccgggggcaggttcgttttatgcgctggcattcgtgacgctggccggattcaacctcgccaaatccaccgcccacgccaaagtcctcaacgcgacctctaacgttggcggtctgctgctgtttatcattggcggcaaggttatatgggcaaccgggtttgtgatgatggcagggcagtttttgggcgcgcgcgcaggctcgcgtctggtattaagcaaaggacaaaagctgatccgcccgatgattgttgtcgtctcggcggtgatgagcgccaaacttctttatgacagccatggacaggagatcctcacctggttggggatgaactaatgaacagtacgcataactacgaacagctgattgagatcttcgatagctgtttcgctgatgattttaatacccgtctgattaaaggcgacgacgaaccgatctatcttccagctgatgacgaggttccgtataaccgcatcatctttgcccacggcttttacgccagcggtttgcacgaaatttcgcactggtgtatcgccgggaaagcgcgtcgcgagctggtggactttggttactggtactgcccggacgggcgcgacgccgccacccaggggcagttcgaagatgtggaggtgaaacctcaggcgctcgaatggctgttctgcgtagcggcgggtttcccgttcaacgtaagctgtgacaatctcgaaggcgacttcgagccagaccgtatcgtcttccagcgccgcgttcatgcgcaggtgatggaatatcttgagaaaggcatcccggcacgtccggcacgcttgatcgaggctttacagaattattaccacacgccggagatcacggcggaatgcttcccttggccggaagatctttaacagaggaaagaagatgatcgcagaatttgaatcacgcattctggcgttaattgatgacatggtggaacacgccagtgatgatgagctgttcgccagcggttatctgcgtggtcacctgacgctggcggtagccgcgctggaagccggggacgatcactctgccgacgccgttcacgcggaagtcactcgcagcctggaaaaagccattctggccggggaactctctccgcgcgaccagtcnnnnnnnnnnnnnnnnnnnnnnnnnnnnnnnnnnnnnnnnnnnnnnnnnnnnnnnnnnnnnnnnnnnnnnnnnnnnnnnnnnnnnnnnnnnnnnnnnnnnnnnnnnnnnnnnnnnnnnnnnnnnnnnnnnnnnnnnnnnnnnnnnnnnnnnnnnnnnnnnnnnnnnnnnnnnnnnnnnnnnnnnnnnnnnnnnnnnnnnnnnnnnnnnnnnnnnnnnnnnnnnnnnnnnnnnnnnnnnnnnnnnnnnnnnnnnnnnnnnnnnnnnnnnnnnnnnnnnnnnnnnnnnnnnnnnnnnnnnnnnnnnnnnnnnnnnnnnnnnnnnnnnnnnnnnnnnnnnnnnnnnnnnnnnnnnnnnggcatgtgggacaatttgttccagcaggcgaaagcgaagtaagtgtatcaccgccctctcccacagggagagggccggggtgagggcaccagaccgcaccctacttgaccattttccccttcagcaatttccgcacccacagtcggtttggattcagccccgcgagcgtaaccctgtccagcggaaccggctcgtcgctcatttgcgcggctaacgcttcagccagcagcggcgcggagcataatccccgcgagcctaagccacccagcataaacagctcgggatgaacgggcgcacttaccgccgtttctttgttgtcagcaagatcctgatagacttcaagcgtggcgtcatagtccggcacgtttcccgccatcggcaggtgatcgcgggtcgcgcagcgtacgccgcagcgcgcctgaccctcactgacatccacctcttttgcccacgacgcatccgggaaacagtcgagcaggcgctggcggttttgctgctgatccgcttcgctgtactgcatatctgtttcaccgcgatggtagctggcaccgatgcagtgatggccgttggacggattttgcggcgtcaggtagccgtcgtaacacagcacctgacgcagtttgctcagttggggggcggcaggaatatggctcacctggccgccgaccggataaaccggcaatgatgctgtctgggtaaactggctgatatgatgtccgttggccagcacaacgctggcatgctggacctctttgccgtcagcgaaacgcagtttccagtgcgcagtgcggcttagcgattgaaccttatgggcataatgcactgtcaacccacgcgactgcccgagggctatcgccgcagaagtcagttcagccggacacagccagccgccgagtggatactgaatacccccgcagccggtgtcgacgccagtggtctctgcaacctgctgtgccgtcactgcatgggcgatggcctccggcagacccagcgacagcatttgtgtgattttctgctggctcttctcgtcccagccgagctgcgtcacgccgcaccagttgtggtcgaacgcaaccggcaggctatcgtaaaggcggcgagcaaacgtaaacgccgccgggaagaactggaacagtgccggatcgtgtgaacttaataagggataaagcgcgccctgacggttgcctgatgcgcccgtcgccggcgcctcgtcagcgcagtagagcgtcacctgccagccacggtgcagcagcgccagcgagagcagggcgctggcgatacccccgcccaaaatggcgacctcacgcgaggtgctggcgcgacgggcaaaccagggggcctgcgccgggatcgccagatcctgttccatcaccccgaccagcatgtcgcgtttgcggccaaagcctttggttttcctcatggtaaaccccgcctcctgcaacccacggcgaacaaatcccgccgaggtgaaggtggcaagcgttgcgcccgggcgcgccagacgtgccatggcgctgaacaggtgcgggctccacatgtccgggtttttggcaggcgcaaaaccatccaggaaccaggcgtccaccttctgattcattgagtcatcaagcttatcggtcaggtcgttaatgtcgcccagccacaggtcgagggtgacgcgtccgtcgtccagaatcagacgatgacagccaccgatagccggaggccactgggcctgaagctgttccgcccagtgggtaagctccggccagcgctgatgggcaagccgcagatcgtgcgcggtaagcggaaatttttcgaaactgatgaaatgtaatctttgtaaggtagcctcggggtgtgcagtgcgaaactggtcgaacgcctgccagagggtcagaaaattcagcccggtgccgaaaccgctctccgctacgacaaacaggctgcgcggatgctcagggaagcgggtgctgagatgatttccttcgaggaaaacatagcgcgtctcttccagtccgttatcattagaaaagtagacgtcatcaaaatctcgggaaacaggtgtaccctcagcgttgaattcgaggttggcaggttgtatggcgttttgtttcacgtaagttactcgtccgacaggcagtggcacgatcttagcgatgtgagcccatcggtgcaaatttccacagaaaatggctgatcggacttgttcggcgtacaagtgtacgctattgtgcgactcgaaactttttatagtgcgacttacagaggtattgaatgaaacgtgcagtgattactggcctgggcatcgtttccagcatcggtaataaccagcaggaagtcctggcatctctgcgtgaaggacgctccgggatcactttctctgaagagtttaaagattctggaatgcgtagccacgtatggggtaacgttaaactggacaccaccggtttaattgaccgtaaagtggttcgtttcatgaacgatgcctctatctacgcctatctttccatgcaggaagcgatcaaggattctggtctgagcgaagacgcttaccagaacaacccacgcgtgggcctgattgcaggctccggcggttcctctaaagctcaggtgttcggtgctgacgccatgcgcagcccgcgcggcctgaaagcggtcggtccatatgttgtgaccaaagccatgggttcagcggtttccgcgtgcctggcaacgccgttcaaaatccacggtgtgaactactccatcagctccgcatgtgcgacctccgcacactgtatcggtaatgcggttgagcagatccagctgggcaaacaggacatcgtatttgctggcggcggcgaagagctgggctgggaaatggcctgtgagtttgacgcaatgggcgcactgtccaccaaatacaacgaaacgccagacaaagcgtcccgtacttatgacgcacaccgcgacggttttgttatcgctggcggcggcggtatggttgtggttgaagagctggaacacgcgctggcgcgtggcgcgcacatctatgctgagatcgtgggctacggcgcaacgtctgacggcgctgacatggttgctccatctggtgaaggcgcggtgcgctgcatgaagatggcgatgcacggtgttgatactccaatcgactacctgaactcccacggcacctcaacgccggtaggcgacgtgaaagagctgggtgcgatccgtgaagtgttcggcgacaacagcccggctatctctgcaaccaaagccatgaccggtcactctctgggagcggcgggcgtgcaggaagcgatctactctctgctgatgctggaaaacggctttatcgcgccaagcatcaacatcgaagagatggacgagcaggcggctggcctgaacatcgtgaccgaaaccaccgaacgtgcgctgacgaccgttatgtccaacagcttcggtttcggcggcaccaacgccacgctggtgatgcgtaagctgaaagcgtaagcgtttgaaggtatagtagaagggagccgcgcggctccctttttttatgcctgaacacggagttatgcatgaaggctgttacccctgagaagagcgctccttccgggaatcttccccttttccgcatcgcctttgcggtgtttctgacctatatgaccgttggcctgccgctgccggtgatccccttgttcgttcaccaggagctgggctatggcaacaccatggtcggcattgcggtgggcattcagtttttagcgacggtattaacccggggctacgccggtcgcctggcggatcagcacggcgcaaaacgctcggcgttgcagggcatgtttgcctgcgggctggcggggggagcctggctgctggcggcgctgttgccaatagatgcagcgtataaattcgcgctgctggtggcagggcgtctgatcctcggctttggcgaaagccagctgctgaccggcacccttacctggggaatggggctggtggggcctgcgcgttccggaaaagtgatgtcctggaacgggatggcgatttacggcgcgctggcggcaggcgcaccgctggggctgctgatccacagccagtttggttttgcggcgctggcaggcaccaccatggtattgccgctgctggcgtgggcgtttaacggttcggtgcgtaaggtgcccgcccataaaggcgagcgtccttcgctgtggagcgtggtagggcaaatctggcagccggggcttgggctggcgcttcagggggtgggcttcgcggttattggtacctttgtttccctctatttcatgagccgcggctgggcgatggcgggctttacgctgacggcctttggcggcgcgtttgtattgatgcgcgtgctgtttggctggatgccggatcgctttggcggcgtgaaggtggccgtggcgtcacttgtcattgagaccgtgggtctggtactgctctggcaggcgccctctgcatccgttgcgctgctgggtgcggcgttaaccggctgcggctgctcgctgatcttcccggcgctgggcgttgaagtggtgaagcgcgtggctccgcaggtgcgcggcacggcgctgggcggctatgcggcgtttcaggatatctcatacggcatcaccgggccgctcgcggggctgcttgcaacgtcgtttggctatccttccgtcttcctggccggtgcggtgtcagcggtggtgggaattgtggtgacgctggtggcgtttcgcaagcggtagtatgttgccgggtggcggcttcgccttacccggcctactgttcgagccgttgtaggcccggtaagcgaagcgccaccgggcaaatcctcacgcaaccagccagaaaatcgccagcgcaatcaccaacgcgataaacatcaatcccggacgggcagaaagcgttttgaacgtatcaactacgggggcaaacagcgggctgtagatcggctgaatgtttcttacctccggcacgccgccttcccgctcggcgcggcgaatgaagatctgattgagcacatcctgcacctgcgcggtggtcagcaccgtttgcggcgtagcctgccagctctgctgagcgtaatcccgaatcatatcgaactcgtgcggttccagcggttgtttcagcgccgcctgtacgctgtgcagggtcggggcgctctgggtgctgagcgtctgacgcgcctggagccaggtgaccagatgggtaaactgttttgccgggatcatctcgcccgctttcacaccggaaagttccagcatggattgccagataagctttgtgggttcgccggtagcggcagccagcttagtgaccatctgcttaagcgtattatgctccgcaggctgcaatggccgctctgtagacgggcgctgttgcggctgcgggatagaaagctgattgctttgtagcagggtcaacacggttttcagctgttcttgcgaaagctggctcagggcggtatgaccgtactgttgacggataaaatcactcaccgcctggcgattattcccctggcccaacagctcggtcagctgcgagataatctggcgggtagtatgttgctgctgtgcgcttgtaagacgctggttcaggttttgttcggcggcagggaaatggcgcgactgtagcggcgcatcgtttctgacgcccaaatcgtgcttaacgccggcccatacctctgcgttttgctgtgaggttaacgcaataagacgcgtaatcagacgctccagtacggtgcgttgctgcgtggagagcggttgttcgcctggcgtgttgggcgttacggggccttcacccggagggcgcggaggcgtacctgaaatgggctgcatcgtcaaaaatccttaaagtcaaactctgcgtaaccgggcggagatatatgcccggcggcgagattatggcacacttggcaggtttacttcctctcaaacaggtactcagacgtgaaaatcctcgttgatgaaaatatgccttacgcccgtgagctgttcagccgcctgggtgaggttaaggctgtccctggtcgcccgattccggtcagcgaactggacgatgcagacgccctgatggtgcgctcggtgaccaaagtaaatgaggcactgctcaccggcaaaggggttaaatttgtcgggacggcaacggccgggaccgatcatgtggatgaccagtggcttaagcaggcggggattggtttttccgcggcgccaggctgtaacgccattgccgtcgtggaatatgttttctcctcgctattgatgctggccgagcgcgatggttttgcgctgaaagaccgcaccgtcgggattgtgggggtgggcaacgtgggcggacgtctgcaaaagcgtctggaagcctggggtatccgcaccctgctgtgcgatccgccgcgtaaggataacggcgatgaaggcgacttccgcacgctggatgagctggtcgacgagtgcgacgtcatcaccttccatacgccgctctttaaagaggggccgtacaagactctgcacctggccaacgaaaagctgatccgccgtctgaaggctggcactattctgataaatgcctgccggggaccggtggtggataacgcggcgctgctggcatgtctcgacgaaggacaagagcttagcgtcgtgctggacgtctgggaaccagagccggatctcaacgtcgccttgctgaataaggtggacgtgggtaccgcgcatatcgcgggttatacccttgaaggcaaagcgcgtggcacaacccaggtgtttgaggcttacagcgcctttatcggccatccgcagcaggtggcgctggatacgctgctgcccgcgccagaatttggtcgcatcactctgcacggcccgctcgatcaggcaacgctgaaaagactggtgcatttggtgtatgatgtgcgccgcgatgacgcgctgctgcgtaaagtggcgggtattccgggtgagtttgacaagctgcgcaaaaattaccttgagcgccgcgagtggtcttccctgtatgtcatgtgcgatgacgcgtcagcggcggggctgctgcataaactgggatttaacgccgttcaccacccggcacgttaatgtcttcttaatgctccctgtcggatattccggcagggacgctttttatttctggagtaaaccaccatgtctgaaggctggaacattgccattttgggtgccactggcgccgtgggcgaagccctgcttgaaacccttgctgagcgtcagttcccggtgggtgagatttacgcactggcgcgtaccgacagcgcaggagaacatctgcgtttcggcggcaaatccgtgatggtgcaggatgccgccgcgtttgactggacgcaggctcagctggcgttttttgccgcaggtgcggaagccacggcgtcttacattgaagaagcgacaaattcaggctgtctggtgatcgacctgagcggcctgttctccctggagccggatgtgccgctggtggtgccggacgtcaacccgtttgtgctggctgactaccgcaaccgcaacatcattgcagtaccgaacagtctcaccagccagttgctgaccgcgctgaagccgctgatcgacgacggtggcctgtcgcgtatttccgtgaccagcctgctttcagcctccgctaacggtaaaaaagccgtagacgcactggcagggcagagcgcgaagctgctgaacggtatcccgatcgacgaagatgatttctttggccgccagctggcgttcaacatgctgccgctgctgccggatcgtgaaggttcggtgcgggaagagcgtcgtatcgtcgatgaagcacgcaaaattttgcaggatgacgggctgatgatctccgcgaatgtcgtgcagtctccggtcttttacggccacgcgcagatggtcgggtttgaagccctgcgtccgctggcggctgaagaagcccgcgacgcgtttggccgcggtgaggacattgtcctgtccgaagagagcgaattcccgacgcaggtgggcgatgccaccggcagcgcgcatctctctgtgggctgcgtgcgtaacgattacggtatgccggagcaggtgcagttctggtccgttgccgacaacgtgcgttttggcggcgcgctgatggcggtcaaaatcgcggaaaaactggtgcaggagtatctgtactgatgtcagatgtggaacaaaagccggtccacagaattgccctcggcattgaatacgatggcagtaaatactatggctggcagcggcagaatgaggtgcgcagcgtccaggagaagctggagaaagcgctctctcaggtggcgaatgaaccgataagcgtcttctgtgcgggccgcaccgatgccggcgttcacggcacggggcaggtggtgcattttgacaccaccgccgtgcgcaaagacgcggcctggacgctgggtgtaaatgcgaatttgcctggtgacattgccgtgcgttgggtgaaagctgtgccggatgattttcacgcgcgtttcagcgcgacggcgcggcgctaccgttatgtcatctataaccagcgcctgcgcccggcggtgttaagccagggcgtgacgcatttttatgaaccgctggatgcagaacgtatgcagcgtgcggcgcagtgtctgattggagagaatgattttacgtcgtttcgtgcggtgcagtgtcagtcccgtacgccgtggcgtaacgtcatgcacattaacgtcagtcgttatggcgcgtatgtggtggtggatatcaaagccaatgcctttgtacatcatatggtgcggaatattgtaggcagcctgatggaagtgggcgccggacaccagccggagagctggattgcagaactgctggcagcgaaggacagaacgcttgcggcagcaacggcgaaagcggaagggctgtatctggtttcggtggattatccggaccggttcgacctgccaaaaccgccaatgggcccgctgtttttagcggactaaacaaaggtgcaattagggcttagacaatatggacgtaatacgttttctgattgatttcatcctgcatattgatgttcacctggcggagctggtcgcgcagtacggcgtctgggtgtacgccattctgttcctcattctgttctgtgaaaccggccttgtggttacgccgttcctgccgggagattcactgctgttcgtggcgggcgcgttatccgcactgccaacgaatgacctgaatgtccatctgatggtggtcctgatgatcatcgccgcgattgttggtgatgcggtcaattacaccatcgggcgggtgtttggcgagcggttgttcagtaatccggattcgaagattttccgccgcagttatttagataagacccatgcgttctatgagcgccatggcggtaagaccattatccttgcccgttttgtgcctattgtgcgtacatttgcaccgtttgtggcgggaatgggtcacatgtcctatcgtcattttgccatgtacaacgtggtgggcgcgctgctgtgggtgctgctgttcacctatgcaggctacctgtttggcgatctgccggtggttcaggaaaaccttaagttactgattgtagcgattattgtgctttccgtactgcctggcgtcatcgaaattatccgtcacaaacgcgcggcggcaaagcaagcgaagtaaatgcacgctggcggttcgaccacttttttatccaaagtttcgggctgttatgttttaatgtgcaacattcatggtctgttggaggcaaaaatggcattattcgcctcttacagcaaaactggcatacgaccaggttcaggcagaaaggttatcaatgagctggattgaacgaattaaaagcaacattaccccaacgcgtaaagcgagcattcctgaaggggtatggacgaagtgtgatagctgcggccaggttctgtatcgcgcagagctggaacgcaatcttgaggtgtgtccgaagtgtgaccaccatatgcgtatgtcggcgcgcaaccgcctgcatagcctgctggacgaaggttctctggtagaactgggcagcgaactggagccaaaagatgtgcttaagttccgcgactccaaaaaatacaaagatcgtctggcctctgcacagaaagagaccggcgagaaagacgcgctgatcgtcatgaaaggcaccctgcacgagatgccggtggttgccgccgcgtttgagttctcctttatgggcggctcaatgggctctgtggttggcgcgcgcttcgtgcgtgccgttgagcaggcgctggaagacaactgcccgctgatctgcttctccgcctccggtggcgcacgtatgcaggaagcgctgatgtccctgatgcagatggcgaaaacctctgcggcgctggcgaaaatgcaggagcgcggtctgccgtacatctcggtactgaccgatccaaccatgggcggcgtttctgcaagcttcgcgatgctgggcgacctgaacatcgctgagccaaaagcgctgatcggctttgcgggtcctcgcgttatcgagcagaccgtacgtgagaaactgccgccgggcttccagcgcagtgagttcctcattgagaagggcgccatcgacatgatcgtccgccgtccggaaatgcgcctgaaactggcaagcgtcctggcgaagctgatgaatctgccggcgccgaacccggacgagccgcgcgaaggcgtggtggtaccggatcaggaacccgaggcctgataactgaaaagggcagggccgaatggcgctgcccttttgctttctaaaccgttaatgacaaccgggcatcatggaaaataaaagcattcctcaagccacgtcgcccctggccgcgtggctttcttatctggaaaacctgcacagtaaaactatcgacatgggccttgagcgcgtaagtcaggttgccgcgcgtcttgacgtgctgaaacccgcgcctttcgtgtttaccgtggcgggcactaacggtaaaggcaccacctgccgcacgctggaatctgtcctgatggcggcggggtacaaggttggcgtttacagctcgccgcatctggtgcgctataccgagcgcgtgcgggtgcaaaacaccgagctggcggaatcggcccatacggcgtcgtttgccgctatcgaagcggcgcgcggcgaaacctcattaacctatttcgaatacggcaccctgtcggcgctgtggctgtttaagcaggcgcagctggacgtggtgatcctggaagtggggttgggcgggcgtctggatgccaccaatatggtggatgcggatgtcgccgtcgtcaccagcatcgcgctggatcacaccgactggctgggcccggaccgcgagagcattggccgtgagaaggccggtattttccgggccaataagcctgccgtggtaggcgaaccggacatgccgcataccattgctgaggtagcgaaagagaagggcgctcgtctgctgcgtcgcggcttggactggcagtatgaggtgcaggacaaaggctggcgcttcagcgatgcgcagggcgtgctggagaatctgcccctgccgcaggtgccacagcctaacgcggcgactgcgctggcagccctgcgcgccagcggattagcggtaagcgagcaggcaatccgcgacggcattcagaacgcactgttaccgggacgttttcagattgtgagtgagtcaccgcgtctgattctggatgttgcacataacccgcatgcggcggcgtacctcgcaggacgtctcaaatcgttaccaaaaaccgggcgcgtgctggcggttatcggtatgcttcatgataaagatatcggcggcacgctggcctgcatggagagtgtggtcgatagctggtattgtgctcctctggaagggccgcgcggcgcgactgctgagcagttgatggaacatctcggcaaaggcgaaatctacagcagtgtggtttcggcctggcgtgccgcgatggcggaggctaaaccagaagataccgtgctggtgtgtgggtcattccacacggtggcacatgtcatggaagtgatggacgcggggagaaccggtggcgagtaagtttcagaaccgtttaacaggaaccattgtgctggtcgcgctcggggtgattattctcccgggactgctcgacgggcaaaaaaagcattaccaggatgaatttgcggccattccgctggtacccaaaccgggcgatcgcgacgagcccgatatgctgccagcggcaacgcaggcgctgcctgcccagccgccagaaggtgcagcggaagaggtgcgcgcaggtgatgcagccgcgccgtctcttgatccgtcgcgtctggccgcgaataacaacgttgaaatcgatcctgtaccggtagagcaacccaaaccggttgaaaaaccgaagccggtagagaaaacgcagcctaaaccgcagcgtgacaaagccgacgagcagctggctgcggcaacggaaacgccgccaccggccaaacagacccagcaggaggccgcccctacgggtaaagcctatgtcgttcagctcggtgcgttgaaaaatgcagataaggtcaatgagatcgtgagtaaactgcgcggcgcgggataccgtgtttatacttcacccaccacgccagtacagggtaaaattacccgtatcctcgtggggccggatgcgtctaaagataagctcaaaggttcgcttggcgagctgaagcaaatctccggcctgagcggtgtggtgatgaactacagcgcaaactgatagaaattacccctcaccctaaccctctcccttgagggagagggccggggtgagggggaggcagacgttcacagaaacgtcaaaggtgcggtggcgttgagcattttttcagcgccttttttatttacgcgtgggaaggaaatccctacgcaaacgttttctttttctgttagaattcgccccgaactggatgacagggcgtttaatcgtgggacacatatggtctggattgattacgccatcattgcggtgattggtttttcctgtctggttagcctgatccgtggctttgttcgtgaagcgttatcgctggtaacctggggttgtgctttctttgttgccagtcattactacacttacctgtctgtctggttcacgggctttgaagatgaactggtccgaaacggaatcgccatcgcggtgctgtttatcgcgacgctgattgtcggcgctatcgtcaattacgtgataggtcagctggtcgagaaaaccggtctgtcaggaacggacagggtactcggcatctgtttcggcgcgttgcgaggcgtgctcattgtggccgcgatcctgttcttcctggatacctttaccgggttctccaaaagtgaagactggcaaaaatcgcagctcattccggagttcagcttcatcatcagatggttctttgactatctgcaaagctcgtcgagtttcttgcccagggcataaaccctgagatgtggcttaacgaggaaaagacgaatgtgcggtattgtcggtatcgccggtttcatgccggtaaaccagtcgatttatgacgcgttaacggtgcttcagcaccgtgggcaggatgctgcgggtatcatcaccattgatgcaaacaactgcttccgtttacgcaaggcgaatggcctggtaaacgatgtgtttgaagcccgccatatgcagcgtctgcaaggtaatatggggatcggtcacgttcgttatcctactgctggcagttccagcgcctctgaggctcagcctttttacgttaactccccgtatggcatcacgcttgcccacaatggcaatctgaccaatgcccacgagctgcgtaaaaagctgttcgaagagaaacgtcgccacattaacaccacctctgattctgaaatcctgctcaatatctttgccagcgaactggataacttccgccattatccgctggaagcagacaacatttttgccgccgttgccgcgactaaccgcctgatccgtggcgcgtatgcttgcgtggcgatgatcatcggtcacggcatggtggccttccgcgatccaaacggcattcgcccgctggtgctcggcaaacgtgacctcggcgatggccgttccgagtacatggttgcctccgaaagcgtggcgctggacactctgggcttcgaattcctgcgtgatgtcgcgccaggcgaagcggtctacatcactgagaagggtcagctgtttacccgtcagtgcgccgacnnnnnnnnnnnnnnnnnnnnnnnnnnnnnnnnnnnnnnnnnnnnnnnnnnnnnnnnnnnnnnnnnnnnnnnnnnnnnnnnnnnnnnnnnnnnnnnnnnnnnnnnnnnnnnnnnnnnnnnnnnnnnnnnnnnnnnnnnnnnnnnnnnnnnnnnnnnnnnnnnnnnnnnnnnnnnnnnnnnnnnnnnnnnnnnnnnnnnnnnnnnnnnnnnnnnnnnnnnnnnnnnnnnnnnnnnnnnnnnnnnnnnnnnnnnnnnnnnnnnnnnnnnnnnnnnnnnnnnnnnnnnnnnnnnnnnnnnnnnnnnnnnnnnnnnnnnnnnnnnnnnnnnnnnnnnnnnnnnnnnnnnnnnnnnnnnnnnnnnnnnnnnnnnnnnnnnnnnnnnnnnnnnnnnnnnnnnnnnnnnnnnnnnnnnnnnnnnnnnnnnnnnnnnnnnnnnnnnnnnnnnnnnnnnnnnnnnnnnnnnnnnnnnnnnnnnnnnnnnnnnnnnnnnnnnnnnnnnnnnnnnnnnnnnnnnnnnnnnnnnnnnnnnnnnnnnnnnnnnnnnnnnnnnnnnnnnnnnnnnnnnnnnnnnnnnnnnnnnnnnnnnnnnnnnnnnnnnnnnnnnnnnnnnnnnnnnnnnnnnnnnnnnnnnnnnnnnnnnnnnnngacgttgaccagcagtatctcgactatctggattcgctgcgtaacgacgatgcgaaagccgtccagctgcaaaacgatctcgaaagcttagagatgcacaacgaaggttgatgcgtatgcaggtgagggcgctcgccctcacttgcaactccccgtaaaatcctgcacagtctgccctgaaatcagcaagggcgaaaatcatgaaacgactcattgtagggatcagcggtgccagcggcgcgatttatggcgtccggcttttacaggtgctgcgtgacgttgcaggcgtagaaacccatctggtgatgagccaggcggcgcgtcagaccctctctcttgaaaccgatctctccctgcgcgacgttcaggccctggctgacgttgtccacgatgcccgcgatatcgccgccagcatctcttcgggctcgtttaaaacggccggcatggttattttgccctgttcgattaaaaccctttccggcattgtaaacagctataccgacacgctggtgacgcgtgcagcggatgtggtgctgaaagagcgtcgtcctctggtgctctgcgtgcgggaaacgccgctgcacctgggacatctgcgtttaatgacgcaggcagccgaactgggggccgtgattatgccgccggtccccgcgttctatcatcgtccgcaaacgctggacgatgtcatcaaccagaccgttaaccgcgtactggatcagttcgatatcgacctgccggaagatctctttacccgctggcagggggcgtgaagctgtgcacaaacaaggtgcatgaaaagacaatttgccctgtttcagggcaaaactgcaaccgcgatcatatcctcgacatttaattcgctttttccctttttctctttccggttcgttcggcagacctgctatctttcaccattaaggcagtatcgcaacgttttattaacatatttaacgtcgtagttttaacccgacgacaatgtggcataagacctgcaagaacagcctgcaacacaacacacaacataaaccataataaaatcacggttcttgagggtaaatgtatgaagaagacggttctggctctgtctttgctcgtgggcttgagtgcagcagcaagtagctatgcagcgcttccacagacagttcgtatcggtacagacgcaacctacgcgccattctcctccaaggatgcgaaaggcgacttcgtggggtttgatatcgatctgggaaatgagatgtgcaaacgcatggaagtgaaatgcacatgggtgggcagtgactttgacgcgctgatcccgtcgctgaaagccaagaaaattgatgccattatctcttctctctccatcacggaaaaacgtcagcaggagatcgccttctctgagaagctctacgctgccgactcacgtctgattgccgcgaaaggctcgccaatccagccgaccatcgactcgctgaaaggcaaacatgttggcgtgcttcagggctcgacccaggaaggttacgccaatgctaactggcgcgagaagggcgtcgatgttgtggcttaccagaaccaggatctgatctactctgacctggcggcaggccgtctggatgccgcgtttcaggatgaagtcgccgcgagcgaaggcttcctgaaacagcctgcgggtaaagagtacgcctttgccggcccgtcggtaaaagacaaaaaatactttggcgacggtaccggtattggcctgcgtaaggatgataccgagctgaaagccgccttcgacaaagcgtttaatgagctgcgtaaagacggtacctacgacaaactggcgaagaaatacttcgatttcaacgtctacggtgattaatgcctgaataagatgcactgaagtggtgcatcttaacggggttatgttccagtatggtgcaacacatgcaccatactggatcgctgtgtgcatagttaagcatttaaaatgcaaaaattcccgttcaaaggcattaatctttgcctgaatgaggggattaatggcacattaacaacaccccgtcgtcgtaaaaatctcgtattaagacagtttgttgaggacagatatgaaaaaactggtgttgtcactttctctggtactggctttttccagcgccaccgcggcattcgcagcaattccgcagaaaattcgtattggaactgacccaacctatgcacctttcgaatcgaagaatgcgaagggggaactggtcggttttgacatcgatctggctaacgagctgtgcaaacgcattaaagcgcaatgtacctacgttgaaaacccgctggatgcgctgatcccgtccctgaaagcgaagaaaattgacgtgatcatgtcctccctgtccatcacagaaaaacgtcagcaggagattgccttcacggacaaactctatgcggcggactcacgtcttgtggtggcgaaatcctctgacattcagccaacccttgaatctctgaaaggcaaacgcgtgggcgtgttgcagggtacgacgcaggaaacctacggcaacgagcactgggcgccaaaggggattgaaattgtctcttaccagggccaggaaaacatctacgcagacctcacggcaggccgcattgacgcggcattccaggatgaagtggcggcaagcgaaggcttcctgaaacagcctgtgggtaaagattacaagttcggcggtccgtccattaaggacgaaaaactctttggcgtcggtaccggtatgggcctgcgtaaagaagacaacgaactgcgtgaagccctgaacaaagcgttcgccgagatgcgtgcggacggcacctatgacaagctggcgaaaaagtacttcgattttaacgtttacggcggctaatcgccccgtctgataacgtgcggcccctcccgttgcgggaggggaaaagacacggttccaccactcacgagacgacagggcacgcggtatgctgtacggattttctggcgttattttacagggcgcgcttgtcacccttgagctggctatcagctccgtggtgctggcggtgctgataggcctggcgggcgcgggggcaaaattatccgccaacagaccgctggcgctgatatttgaaggctataccacgctgattcgcggcgtgcctgacctggtgctgatgctactgatcttttacggcctgcaaatcgcacttaacggcgtgacggatgccatcggcatggagcagatcgatatcgacccgatggtggccggtattattacccttggttttatctacggtgcctatttcactgagactttccgcggcgcttacatggccgtgccgaaagggcatattgaagcggcgaccgcctacggttttacctcctcacaaacgtttcgccggatcatgttcccggccatgatgcgctacgcgctgccgggtatcggtaacaactggcaggttattctcaaggcaacggcgctggtctccctgctgggcctggaagatgtggtgaaggccacgcagctggcgggtaaaagcacctgggaaccgttctattttgcggtggtttgcggcgtaatttatctggtctttacgaccgtctccaatggtgtgctgcttctgctcgaacgtcgctactccgtgggtgtgaagagggctgacctgtgattgagattattcaggagtactggaaatccctgctgtggacggatggctaccgctttactggcgtggccatcacgctgtggctgctgatctcctcggtggtaatgggcggcattctggcggtgtttcttgccattggccgcgtgtcgaacaataaatttatccagttccctatatggctattcacctacgtgtttcgcggtacgccgctgtacgtgcagctactggtgttctattccgggatgtacacgctggagatcgtgaaaggcaccgagatgctgaacgcgttcttccgcagcggtctgaactgtacggtgctggcgctgaccctcaatacctgcgcctataccaccgagatcttcgccggggccatccgttctgtgccgcacggtgagatcgaggcggcgcgcgcgtacggcttctcgtccgtgaagctctaccgctgtattattctgccttcggcgctgcgtattgcgctgccggcctacagcaacgaagtgattttaatgctgcattcgacggcactggcgtttaccgccacggtacctgatctgttaaagattgcccgcgatattaactctgccacctaccagccgtttacggcgtttggcattgcggcagtgctctatttgatcatttcttacgtcctgatcagcctgttccgtaaggctgaaaaacgctggttgcagcatataaaaccgtcgacgcactgagaatttatgatggctgagaacaaattaaacgtaattgatttgcacaagcgctacggcgaacatgaagtgctgaaaggggtgtcgctggaggctaacgcgggcgacgtgatcagtattatcggctcatcaggttcgggtaaaagtaccttcctgcgctgcatcaacttcctcgaaaagccgagcgaaggatcgattgtggtgagcggacagaacatcaacatggtccgtgataaagacggccagcttaaagtggcggataaaaaccagctgcgcctgctgcgtacacgcctgacgatggtgttccagcacttcaacctctggagccacatgacggtgctggagaacgtgatggaagcgccggttcaggtgctcggcttaagcaagcaggaagcccgcgagcgtgcggtcaaatacctggcgaaagtgggtatcgacgagcggcagcagatcaaatatccggtgcacctgtcaggggggcagcagcagcgtgtttccatcgcccgtgcgctggcgatggagccggaagtgttgctgtttgacgaaccgacttccgcgctggatcctgaactcgttggcgaagtgctgcgcatcatgcaaaagctggcggaagagggcaaaacgatggtggtggtgacgcacgagatgggcttcgcccgtaacgtttctaaccacgttatcttcctgcatcaggggaaaattgaagagcagggtcatccgaatgaggtgctggcgaacccgcaaagcccgcggttgcagcagttcctgaaaggctcgttgaagtaggtttggcctttctccctctccctgtgggagagggccggggtgagggcatcaggccgcagagccgcccaattgcccggtggcgcttcgcttaccgggcctacaaaacccgtaggccgggcaaacgcagtgccgcccggcattcaacactccagccgatacacccagtcgtcataccgtacgccgttaatctcgtacgccttctccagcacctgcgtgcgcacaaaacccgctttctcaaggacccgcaccgacccaacgttatctgccagcacgtacgcgtttatcgccttcacgcccgtctggttaaatgcatactcgcacaccgcgtgcagcgcctcgctggcaatgccttttccctgcgcggcagtcacaaccgtgtagccaatatccgcctcttcacggttcgccgcactgatttgcaggccgatatccccgagcggcgtaacgtcgttatgcagacggatcacaaagacatgctccgccatcaggcgcgcggcaaatacgcggcgcgtctctttttccggcgtgatagcggccatatagcgcatgatggcggggtcttcacgcagagagcggaagaacgcccagtcagaaggttcgaaaggggtgaggtgaagccgggttgtggtaatggttgccatagttacgccatctcatccagacatggcgtataactctaacatattcactgcaccacatcccccagcgcctcttccaggtcataccagcggaacgtgaacccggccgcttccagccgttttggcagcgcgcgttgcccgcccagcaccagcaccgaagactcacccatcaacagacgaatcgccgttgcaggcacgcgcagcaccgccgggcgatgcagggcatgccccagggcgtgagcaaattgttcattacgtacggggtaaggggataccatgttaaatggcccgcgcagatcgttatccagcagccagagaatgccgttgaccatatcgtcgatatggatccacgccagatactgacgaccgttgccgatgggcccgccaagccccattttaaacggcggcagcattttaccgagaataccacccttcggcgcaagtaccacgccggtgcgcagcaggcagacgcgggtacgatcgctttgcgccgcgcaggcgatgcgctcccactgggcgcagagtttatgggtaaactcgttgtgcggcggctcctcttcggtcaccaccacttcaccgagatcgccatagtagcctgtagcagagccggaaatcagcaccgaaggcggcgtctcgctgttgcgaatcagctcaaccagcctttcggtcatgttccagcggctgctgcataaacgctgtttttgctcttcggtccagcgtttatcggcgataggttcgccagcaaggttgatgacggcgtcaaagccgttcagatcctgcctttccgccaggcctttccagatctcaacgccgacgcccagcacctggcgcgctttctccgggctgcgcgtgaccacggtaatgtcgtgatgcaacgcctgcaaacgtggaatgagatggcgaccaatcaggcccgtaccgccggtgagcaggatcttcatacaacctccaggtttacgcctggcgctgccagcttaacgtcatggagacggagtcggcgtagcgcagggcgtgaagtttatcgatctccacttcagcataagtgacccagtggtgttcgcgtgcgatgtcgagcacatcctgagttaatttttccagtagcgcaaaacggttgttctcaacgtactggatgatgcttttggtgatcgtgcgatagttcagcgcgtcattgatgtcctcgctggcacgcgccttgtctgccgggtagtggatcactacattcaccacgatatcctggcgattcgcgatctcctcctctttgataccaatgaacgtgcgtaagcgtaagttttttatacgaataatagcgtcatgctgggacattgcaggtcttctccgtgtcagtattttcacctcatcatacatgaggaaaacacctgcacccaacggggcgcaggctcaaatctgatggattttttgcatggcgcgttcggtggccgggcgcgtccggatgcgctcaaaccagttgttcactgccggataagtggccagatcgatccggtggcgttcatgggtgttaatccacggccagcaggcgatatctgcaatgctgtaatgctcacctcccagccacggtgatttttccagccgacggttcaggaccccgtacaggcgctgggtttcgacctgatatcgctcaatggcgtaagggatcgtctgcggcgcataggcggtaaagtggtgattctgccccagcattggccccaggccgctcgactgccagaataaccattgcagcgtgtgatgacgctcgcgcaactcaccgctcaggagcttgccggttttctctgccagatagagcaaaatctctccagactcaaacaggcttaacggtttgccgccgtcagaaggcaggttatcaatgatggccggaattttattgttgggcgatatggccagaaaaacggggcggaactggtcgcctttactgatatccacgcgaatgatccggtagtccacttcggcttcttcgagaaagagggtgatcttatggccattaggggtgggggcataatagagatctatcattctcaactcctgtcagtgcgaatagtgttgccataaaaaatcagtataggtgcttgttgtaaatcgtgagttttcatcaagtgacagcgaggcaaagagattatatgttgagtgaaaaccgatcagccgatgaggatgttatgagccagcctgtaataacgttgtggtccgatgcgaacttttttctccttatgtcatgagcgtttatgtggcgctggcagaaaaggggcttacttttagtctgaaaaccgtcgacctggacagcggcgaacatctgaagccccagtggcagggctacgcgctcactcgccgagtccctgtgctggagatcgacggttttgagttgagtgaatcctcggcgattgacgagtatcttgaggaccgctttgccccgccagagtgggaacgcatctatcctcacgatctgcaaaagcgcgcccgcgctcgccagatccaggcatggctgcgtagcgacctggtgccgattcgcacagaacgctctacggacgtggtgttcgctggcgtcaaaaagcccgccctcagcgaggaaggcttatccagcgcccggaagctgatcgaaactgcctcatcgctgctggcgcagggtaaccccaacctgtttggcgagtggtgtattgccgacaccgatctggcgctgatgctcaatcgcttgatcctcaatggcgatgacgtcccacagctgctggtggattacgccacattccagtggcaacgcgcgtcggtacagcgctatctggcactctctgctaagcgcgcgggctgataagacggggcgcttgaggtatgataggggcagtctgaattcctgaggagtaactgatgaaactgatgtttgcgtcggatattcatggatcgctgcccgcgaccgaacgcgtgctttctctgttcgcccaaagcagagcgcaatggctggtgatcctgggcgacgtgttaaaccacggcccacgcaatgcgttgccggaaggctacgctcccgcgcaggtggcggaaaaacttaatcattttgcctcgcgcattatcgccgttcgcggcaactgtgacagcgaagttgaccagatgctgctgcattttcccatcaccgctccctggcaacaggtgttgatggaaaacagccgtttgttcctgacccacgggcacctgttcggcccggataacctgccgtcactcgccgctggcgatgtcctggtttatggtcatactcatattccggtggcggaaaaacgcggggcgttttatcactttaatcccgggtctgtcagcattcctaaaggcggcaatccggcaagctacggcatgtatgaagacgggacattaagcgttatcgcacttaatgatcagcaagttattgcgcagatagcgattaatccgtaagttacaccacaactgcaaacgcgccgaaagagcgcttagacgagaaggtttcccgatggtggagcagaatcatttggcaagtactgagtgggttgacattgtcagcgaagagaatgaagtgatcgcgcaggccagccgcgaacaaatgcgtgcggagcgtctgcgtcaccgcgcgacgtacatcgttgttcatgatggcatgggcaagattctggtccagcgtcgcaccgacaccaaagattttcttcctggtatgctggatgccacagcaggtggcgttgtgcaggccgatgaagtattgctggattccgcgcgtcgtgaagcggaagaagagttaggtatcgctggcgtgccgtttgccgagcacgggcaattttatttcgaagatgaacattgtcgcgtctggggcgggctgtttagctgcgtttcccacggacctttcgccttgcaggaagaggaagtgagcgaagtgtgctggatgacgccggaagagatcaccgcgcgttgcgacgagttcacgccagattcccttaaagcactggcgctgtggatgacccgcaacgccaaaaacgaatccgctaaaccggaaaataaggcggaaaaagaggaagaggctgagtaagccttaacagctttcccgcatacacaggctggacgcgatgggtttatgatcgcgccagtctccgtcattcagacgttccagtaacgctttcccggcttcaatcccaatcttgcgatgcggtactgccatcgttgtcagcggcggctgacagacgcggctgacgtcgctgtcaccaaagcccacgaccgctaaatcgtccggcactttgatgcgtcgacgctggcactcatacagcgcgccgcaggccagttcatctgatacgcacaccagcgcatccagttccggccacgccagcaggaactctggcagttgtgccgcgccggtggagaagttcggcggcatggcggcattaatcactctgttcggcgacaggtggtggcgcagcatcgccttgtaccaaccctgcaaatgctgctgaaaaatccactgctcctggttagcgcacagcaggccgatattctggtagccacgctgaatcaccatctcggtaagttcatacatggcggcgacgttatcaatcccgatattcatatcaatcggatcggcacgcattgcacccatttccatcaccgggatagaggcgtttttcagccagtggcgtacggtatcggagtgctcgacgctgagcagtatcgccgcggcgatattcgaggccagcagcgtttcaagcagtttctcttcctgttcaagacgatgctgagattccgccagcatgatctggtatccggctggctggagcacctgctgtagcccggcgaacatctcggaacagccagcttcggaaagattgggaactaccatcgcgatcgtccatgacgacgccgatgccagtgcgctggcnnnnnnnnnnnnnnnnnnnnnnnnnnnnnnnnnnnnnnnnnnnnnnnnnnnnnnnnnnnnnnnnnnnnnnnnnnnnnnnnnnnnnnnnnnnnnnnnnnnnnnnnnnnnnnnnnnnnnnnnnnnnnnnnnnnnnnnnnnnnnnnnnnnnnnnnnnnnnnnnnnnnnnnnnnnnnnnnnnnnnnnnnnnnnnnnnnnnnnnnnnnnnnnnnnnnnnnnnnnnnnnnnnnnnnnnnnnnnnnnnnnnnnnnnnnnnnnnnnnnnnnnnnnnnnnnnnnnnnnnnnnnnnnnnnnnnnnnnnnnnnnnnnnnnnnnnnnnnnnnnnnnnnnnnnnnnnnnnnnnnnnnnnnnnnnnnnnnnnnnnnnnnnnnnnnnnnnnnnnnnnnnnnnnnnnnnnnnnnnnnnnnnnnnnnnnnnnnnnnnnnnnnnnnnnnnnnnnnnnnnnnnnnnnnnnnnnnnnnnnnnnnnnnnnnnnnnnnnnnnnnnnnnnnnnnnnnnnnnnnnnnnnnnnnnnnnnnnnnnnnnnnnnnnnnnnnnnnnnnnnnnnnnnnnnnnnnnnnnnnnnnnnnnnnnnnnnnnnnnnnnnnnnnnnnnnnnnnnnnnnnnnnnnnnnnnnnnnnnnnnnnnnnnnnnnnnnnnnnnnnnnnnnnnnnnnnnnnnnnnnnnnnnnnnnnnnnnnnnnnnnnnnnnnnnnnnnnnnnnnnnnnnnnnnnnnnnnnnnnnnnnnnnnnnnnnnnnnnnnnnnnnnnnnnnnnnnnnnnnnnnnnnnnnnnnnnnnnnnnnnnnnnnnnnnnnnnnnnnnnnnnnnnnnnnnnnnnnnnnnnnnnnnnnnnnnnnnnnnnnnnnnnnnnnnnnnnnnnnnnnnnnnnnnnnnnnnnnnnnnnnnnnnnnnnnnnnnnnnnnnnnnnnnnnnnnnnnnnnnnnnnnnnnnnnnnnnnnnnnnnnnnnnnnnnnnnnnnnnnnnnnnnnnnnnnnnnnnnnnnnnnnnnnnnnnnnnnnnnnnnnnnnnnnnnnnnnnnnnnnnnnnnnnnnnnnnnnnnnnnnnnnnnnnnnnnnnnnnnnnnnnnnnnnnnnnnnnnnnnnnnnnnnnnnnnnnnnnnnnnnnnnnnnnnnnnnnnnnnnnnnnnnnnnnnnnnnnnnnnnnnnnnnnnnnnnnnnnnnnnnnnnnnnnnnnnnnnnnnnnnnnnnnnnnnnnnnnnnnnnnnnnnnnnnnnnnnnnnnnnnnnnnnnnnnnnnnnnnnnnnnnnnnnnnnnnnnnnnnnnnnnnnnnnnnnnnnnnnnnnnnnnnnnnnnnnnnnnnnnnnnnnnnnnnnnnnnnnnnnnnnnnnnnnnnnnnnnnnnnnnnnnnnnnnnnnnnnnnnnnnnnnnnnnnnnnnnnnnnnnnnnnnnnnnnnnnnnnnnnnnnnnnnnnnnnnnnnnnntgacagttcaatctccatactccctaccatgatgattatctacctgatcatggcggtgagcgccggacgtgagtacgtggaggccaccttcagcggcggccagaactacctggtgtacgccatcattatggccatcaccttcgcggcaggcgtgttcatcatcttgcagggcgtgcgcctgattctggcggaaatcgtcccggcctttaccggcttctcggaaaaactggtgcccaatgcgcggcctgcgctggactgcccggtggtctacccgtatgcgccaaacgcggtgctgattggcttcctgtttagcttcctcggcgggattgtgggcttgttcatctgcggtcagtttagctgggtgctgatcctcccgggcgtcgttccgcacttcttcaccggcgcaacggcgggcgtgttcggtaacgccaccggtggacgccgcggggcaatgattggcgcctttgctaacggcctgctgatcaccttcctcccggtcctgctgctgcctgttctgggcgcaattggctttgcgaatacgaccttctcggacgctgattttggtgcggtcgggattgtgctgggcaacctggcacgcttcctgtcgccgcttgccatcaccggactggttgttgtgttgttcgcgctgctggtggcctacaacgtcttcgctaaaaacaaacctgccagcggtaacgcgcaggaaaaccccggagccaaatcatgaatgagaatgaaataaccgacctggcgcgtcagatccgccttgagacgctgaaatcccttacgcagctgggttttggtcactacggcggcagcatgtcagtcgttgaaacgctggccgttctgtacggcgcggtaatgaaaattgacccggccgatccggactggccagagcgcgattactttgtgctgtcgaaaggccatgcggggccggcgctgtacagcacgctggcgattaagggctacttcccgattgaagagttgagcacgctgaaccagaacgggacgcgtctgccaagtcacccggatcgcctgaaaacacgcggcgtggatgccaccaccggttcactggggcaggggatctccatcgctggcggcatggcgctgtcgcacaagctggcaggaaggccaaaccgggtgttttgcatcgttggcgacggagaactgaatgaagggcagtgctgggaagccttccagtttatcgctcaccatcgactgaacaacctgacggtattcgtggactggaacaaacagcagctcgacggcgagctggacgaaatcatcagcgccttcgacctggaaggcaaattccgcgcctttggttttgacgtggtgacggtgaaaggggatgacattccggcgctgctggaggtgaccgcgccgatccctgaggccgatgcgcgtccgcgggtggtgatcctcgacagcatcaaagggcagggggtgccatatctggaacagctcagcaactcgcatcacctgcgattaaccgaggagagcaaagcggcgcttaacgagacgattcgccaactggaggcttcacatgattaaggttgcaccgacaggacagaaagatgccgttgagatgcgtaaggtctacgcgggttttgtggcaaaacagattgaggccgggagcgagatcattgcgctcgaagcggatctgatgagttcgatggcgatggacggcgtagcgcgtgattatccacagcacgttatcaactgcggcattatggaggccaacgtgattgggacggccgccgggctgtcgctcaccggacgtaagccgttcgtccatacctttaccgcctttgccagccgtcgctgcttcgaccagctgtttatgtccctggactaccagcgcaataacgtgaaggtgattgcctcggatgcgggcgtgacggcctgccacaacggcgggacgcatatgtcttttgaggatatgggcatcgtgcgcggtctggcgcattcagtggtgcttgaggtgaccgatgcggtgatgttcgaagatgtgctgcgtcagcttatcgacctggaaggcttttactgggtaaggaccatccgtaaacaggcgccgagcgtgtatgccccggggtcaaccttcaccatcggcaagggcaacgtgctgcgcgagggaaccgatattaccctgattgctaacggcattatggtggcggaagcgctggaggcggcgcgccagctggagcaggagggggtaagcgcagcggtcatcgacatgtttaccctgaagcccatcgatcggatgctggtgaaaaactatgccgagaaaaccgggcgtattgtgacctgcgaaaatcacagcattcacaacgggctggggtcggcggtggcggaagtgctggtggaaacctgtccggtgcctatgcggcgggtgggggtgaaggaacggtatggtcaggtgggtacgcaggacttcttgcagaaggagtatggcctgacggcacatgacattgtgtcggcggcgcgggagctgctgtaataaaaaaggcgaccatttgtggtcgcctttttgttgcccggtggcactcgcgcttaccgggcctacggtcctgtaggccggataagcgaagcgacatccggcaagaccttacaattactgctgctgcgaagactggatcgcggtcagcgcgatggtgtagacgatatcgtcaaccagcgcaccacgggacaggtcgttcacaggtttgcgcatgccttgcagcattggcccgatggagatcaggtctgctgaacgctgtaccgctttataggtggtgttaccggtgttcagatccgggaagatgaacacggtagcgcgacctgcaaccggcgagttcggcgctttggatttcgccacgtcagccattaccgcggcatcgtactggagcgggccgtcgatcatcagatccggacgtttttcctgtgcaatgcgggtcgcttcacggactttctctacgtcactacctgcaccagaggtgccggtggagtaggagagcatcgcgacgcgtggttcgataccgaaggcaatcgcggagtccgcagactggatagcgatttctgccagctgctctgcggttgggtccgggttgatcgcgcagtcgccgtaaacgtaaacctgttcaggcagcagcatgaagaacacggaggagaccagagagctgcccggtgcagttttgatcagctgcaacggtggacggatggtgttcgcggtggtgtgaaccgcaccggaaaccagaccgtcaacttcgtcctgctccagcatcagcgtacccagcaccacgttgtcttccagctgctcgcgcgcaacggcttcggtcatgcctttgttcttacgcagctcaaccagacgggcaacgtagctttcgcggaccacgtcaggatcaacgatttcgatgcccgcgccgagctcaacgccctgagacgccgcaacgcggttgatctcatccgggttacccagcagcacacaggtcgcgataccgcgctctgcacagatggctgccgctttaacggtacgtggttcgtcgccttctggcagaaccacgcgtttgcccgctttacgcgccagctcggtcagctggtaacggaaggctggaggagacagacgacggctgcgctcggaggtcgccgtcagggattcgatccagtctgcgttgatgtagcccgcaacgtattcctgaactttctcgatacgctcgtggtcatcaaccggcacttcgaggttgaagctttgcaggctcagggaggtctgccaggtgttagtgttcaccatgaagactggcaggccagtggcgaacgcacgttcgcacagcttgcttacgcgtgggtccatctcgtaggcaccggtcagcaggatcgcgccgatctccacgccgttcatcgcggccagacaggctgcaaccagcacgtccggacggtctgcggaggttaccagcagggaacctgcacggaagtgctccagcatgtgtggaatgctacgtgcgcagaaagttacggacttcacgcggcgggtgttgatatcgccttcgttgatcacggtggcgttcaggtgacgcgccatatcaattgcacgggtggcaatcagatcgaagctccatggcaccgcgcccagaacaggcagcgggctggaatcctgcaacttagccgggtcaactttgatgactttcgctttggaagagtcgtcaaaaatttcggacaggtcaggacgcgtacggccctgctcatctactggcgcgttcagcttgttaacaatcacgccggtgatgctggtgtttttcgcaccgccgaagctgctgcgcgtcagttcgatacgctctttcagctgctctggggtatccgtgccctgagacatcacgaaaacgatctctgcgttcagggttttcgcgatttcaaagttcagagactgggcaaactggtgtttacgggtcgggaccaggccttcaaccagcaccacttccgcgtcctgcgcgtttgcgtggtagttggcaatgatctcttccatcagcacgtctttctggttgctggagagcagagattcaacgtggctcatcttcagcggttcagccgctggcagattggagttcttgcgaacgatggtggtggtctggtctggcgcatcgccaccggcacgtggctgggcgataggcttaaagacgctcagacgaacgcctttgcgttccatagcgcggatcacgccgaggctgacgctggtcaggccgacgctggttccggtagggatcagcataatagtacgggacacggtttatcctctttcgttaccgccgcgttgggcgggttacaaaacagcaccgccagcattgctggcggtgtggaatcaggcagtcaggcggtgcgcgtcttgcgcgatgaccagctcttcgttagttgggataacgatagcagggcgggtgccttctttgttgatgaagccagacttgccgaagcgggcagccaggttacgctcatgatcaacttcgaagcccagaacgcccagtttgcccagggacagttcacgtaccattgccgcgttctcaccgataccgccggtgaagataacagcatccagacggccttccatcagcgcggtgtaagaaccgatgtacttcgccagacggtggcaataaacgtccattgcacgtttagcgtcagctttttctgcgtagttgtcttcaacgtaacggcagtcgctggtgacctcggtcaggcccagcaggccagactctttggtcagcattttgttgatgtcgtcaacgctcatgcccagggtgtcgtgcaggtggaagatgatcgccgggtcgatatcaccggaacgggtacccatcaccagaccttccagcggggtcagacccatagaggtgtcaacacacttaccgttgcggatagcggaaacagaaccaccgttgcccaggtggcaggtgatgatgttgacttcttcaaccggcttgttcagcacttttgcggcttcctgagtcacatagaagtggctggtgccgtgagcgccgtaacgacggacgccgtgctctttgtacaggctgtatggcagggcatagaggtaagactcttccggcatggtctgatggaacgcggtatcaaacacggccacgtttttgtctttcagactcgggaaggatttcagtgcttcagcgataccgatcaggtgagccgggttatgcagcggtgcgaaagacgcagagtctttgataccctggatcacggagtcgtcgattaccacggaactggtgtatttttcgccgccgtggacgatacggtgaccaattgcggtcagctgagcagacagttctggtttttgtgccagaatagtgttaacgataaagttcagcgcttcactgtgagcggcgcctgcacctaaagccgcttcttgtttgctgccgtccatcttccacttgatacgtgcttcaggcagatggaaacattcggccaaaccagagaggtactcgtcaccgttgagcgcatcgatgatggcgaatttcagtgaggagctaccgcagttcagaaccagtactaacttactcgacatggaagtacctattattgatacgtggctaaaaaaacgtcagtgagtctaaaagcgtaacgcatgctgacccagacatttatgattaacatcatgccaaacaaacattctggcaggatggaagaaatacctatgattttaagccattttgaacatttttcagacaatggcataatatgcgataatttgacgagttaacgcttatcgtctacggccctatcaggctggcacaggatacccgatacggggtagcgatgacaaaatattttgaacgttgtcatagcctgttgtggttttgcacgaaaattttaatttttatatgtgaagttgaggtacagccatgtcgacacccgaaatcccgtccgtgaacttttttagtctgtttctcggggacagcattacgcaaagacatggccgatggaaaagcgcctcgcgcccatgtttattgaaaatcgcactattcgcgccacgcgctatgcgattcgctttatgcccccgattgccgtttttaccctgtgctggcagatagcgttaggtggacagcttggccctgccgtcgcgacggcgctttttgcgttaagcctgccgatgcaggggctatggtggttaggcaaacgttccgtcacgccacttccgccttctgttttacactggttttatgaagtgcgtggaaaactggaggaggcgggccaggcgctggcaccggttgaaggcaagccagactatcaggcgctggcggataccctcaagcgtgcgtttaaacagcttgataaaacattcctcgatgacttgtgattgatcatcgaaacgacgaccaaaagaaggcacagtaacaatcagttaccgtgtcttttttttacagtgcaatgcgctacaggagtcgaaagatggaaatgacccatgctcaacgtctgattttgtctaaccagtacaagatgatgactatgcttnnnnnnnnnnnnnnnnnnnnnnnnnnnnnnnnnnnnnnnnnnnnnnnnnnnnnnnnnnnnnnnnnnnnnnnnnnnnnnnnnnnnnnnnnnnnnnnnnnnnnnnnnnnnnnnnnnnnnnnnnnnnnnnnnnnnnnnnnnnnnnnnnnnnnnnnnnnnnnnnnnnnnnnnnnnnnnnnnnnnnnnnnnnnnnnnnnnnnnnnnnnnnnnnnnnnnnnnnnnnnnnnnnnnnnnnnnnnnnnnnnnnnnnnnnnnnnnnnnnnnnnnnnnnnnnnnnnnnnnnnnnnnnnnnnnnnnnnnnnnnnnnnnnnnnnnnnnnnnnnnnnnnnnnnnnnnnnnnnnnnnnnnnnnnnnnnnnnnnnnnnnnnnnnnnnnnnnnnnnnnnnnnnnnnnnnnnnnnnnnnnnnnnnnnnnnnnnnnnnnnnnnnnnnnnnnnnnnnnnnnnnataacgctgcgcgctacagccgcctgcaaaccattgttgacgtggtttggcttgcagatgcgcgaactggatcgcgaatttggcgaactgaaagaggaaacctgccgtatcgttatcgacatcatggagatgtaccatgcgctgcatgtgtcctggaccaatctgaaggaccagcagaccattgacgagcgccgcgtgacgttcctgggctttgatgctgcgacggaagcgcgctatctgagctatgtacgctttatggtgaataccgaagggcgttacacccattttgatgcgggtacgcacggcttcaacgcccagaccccgatgtgggataagtatcaacgtatgctgagcgcgtggcacgcctgtccgcgtcagtaccatttaagcagcaacgaaattcaacaaatcattaatgcctgacggaggtgtgtgtgcagtgtaaaggttttctgtttgatctggacggtacgctggtggattcgctaccggtggtggagcgctcgtggtgccactgggccgaccggcatggcatcgaccatcaggacgtactgaatttcatccatggcaaacaggccattacctcattgcggcacttccttgcgggacgttctgaggaagagattcaggcggagttccgctatcttgagcagattgaagctaccgataccgaaggcatcaccgcgctgcccggtgcgcgtgaactgcttgagcacctgaatgaagcgcagatcccgtgggctatcgtcacctccggctcggttcccgtcgcgcatgcccgtcataaggcggcaggtttaccgacgccggacgtcttcattaccgctgagcgcgtgaagcgcggcaagcctgaaccggatgcgtttctgctcggcgcagaactgcttggccttgcgccagcggagtgcgtggtggtggaagacgcggcggcaggcgtgctggccgggctgaacgccggaagccacgtcattgccgttaacgtcccggcgggttccccccggctggaagaggcggatttcgtgcttaacaccctgaccgccatcgacgtctcgaaggcgtcagacggagttgtaaccgtctcgctaaaaatgtaatcccatgatatagccccgcattaccggggcttttttatggcagaattgcttctcctccactgacaaggacatgttgtgaacggtgaactgatttgggtcctgagcctgctgttaatcgccatcattctttttgccacgggcaaggtgcgcatggatgccgtcgccctgtttgtgattgtcgcattcgttctgagcggtaccctttccctgccggaagccttttccgggtttagcgatcccaacgttattttgattgccgccctgtttattattggcgacgggctggtacgcaccggcgtggcgacgatgatggggtcgtggttggttaaggtggcgggcagcagcgaaaccaaaatgctgatttacctgatgctgacggtcgccgggctgggcgcgtttatgagctctacgggcgtcgtggccatctttattccggtcgtgctgagcgtctgcatgaggatgcagatctccccgtcgcggctgatgatgccgttgagcttcgccgggctcatcagcggcatgatgacgctggtcgcaacgccgccgaacctcgtcgtgaacagcgaactgatccgtgaggggcttgaggggtttagctttttcagcgttacgccgatcgggctggtggtactggtgatgggcattatctatatgctattgacccgtttcgcgctgaaaggggagaagcaggataaagccaaagagggctggaagcggcgctctttccgcgatctgattaaagagtatcgtctgaccgggcgtgcccgacgtctggctatccgcccgggatcgcctatggtggggcagcggctggatgaccttaagctacgcgaacgctatggcgcgaacgtcatcggggttgagcgctggcgtcgttttcgccgggtgatcgttaacgtgaacggggtgtcagagtttcgcgcgcgtgacgtcctgctgattgatatgtccaccgcggacgtggatctgcgcgagttttgtagcgaacagctgctggagccgatggtgctgcgcggtgagtatttctccgaccaggcgctggatgtgggaatggccgaggtgtccctgatcccggaatcggagttattgggtaaaaccgtgcgtgaaatcggctttcgtacccgctatggcctcaacgtggtgggcctgaagcgcgatggcgtagcccttgaaggggcggtggtggatgagccgatcctgctgggggatatcttcctcgtggtcggcaactggaaactgattagccagctcgggcagaaaggccgcgattttgtggtgctgaatatgccgattgaagagaacgatgcatcaccggcgcacagccaggcgccccatgcgattttttgcctggtattgatggtcgcgctgatgctgacggacgagatccctaacccggtggcggcgataatcgcctgtctgttaatgggcaaattccgctgtattgacgccgaaagcgcttacaaagcgattcactggccgagcatcattctcatcgtcgggatgatgcccttcgccctggcgctacagaaaaccggcggggtggatttgatcgtgaaaggcctaatggacgcgggcgggggatatggtccgtacctgatgatggtttgcctgttcgtcatgtgtgccaccatcggtttgttcatctccaataccgcaacggcggtgctgatggcgcccattgcgctggcgatggcaaaatcgatgggcgtttcgccgtatccgtttgcgatgatcgttgcgatggcggcgtccgcggcatttatgacgccggtctcttccccggtcaatacgctggtgctggggcccgggaattataggttcagtgatttcgtgaagctgggtgtgccgttcaccgtgctggtgatggtggtgtgcgtggtattgataccggtcctgtttccgttctgagcattttgccgggtggcggctacgccttacccggcctacaaccccgtaggccctgcaagcgcagcgccgctgggcgaaaatcagagtggcgaatcctggctaatctcatccagcgacaaatggaagctcggcacaaacacgcgcataaagtagtccatctcttcgctgcgacgagattccagcgttttttccagacgcgtttttgccagtaaaaattcgttattcccggcggacagttcttccagacacttcaggtaggcgcacagcgcatcggcctgcttaaccagggatttctcctcttccgtatactgatgctcatcgatcagcggcccgaagatatcgcgcagctcttcaggcaccatgtcgatcagcttctgctgggcaatcttctcaatggccttatattcctgggcaatctgcgagttgaaatatttcaccggcgtaggcagatccccggtcagcacttccgatgcatcgtgatacatcgccagcagggcgatacgttcggcattcacctgcccgttgaatttgcggtttttaatcgcggccagcgcgtgcgcgaccatggcaacctgcaaactgtgctcagacacattttcagtacgcacattgcgcatcagcggccagcggttgatgagtttcaggcgggagaggtgggcaaagaaatgactctgactcataggttaccttatgtcttcactgcgacagacttcattgtgcggggaggggagggaagatgcaaatttgcggatgttgcaggccgggtaagcgcagcgctacccggcggaaagtcagcgttactgatggtacccggagaggaagcgcccgaagcggctgatggccatctcgagatcgtcttcgcgcggcaaggtgacgatacgcacgtgatccggccacggccagttaaacgccgtcccctgaaccagtagcactttttcctgcaacaggaagtcgagcaccattttctggtcgtcgtgaatattgaagcgcttcgcgtcgattttcgggaacatgtacagcgcgccgttaggcttcacgcaggagacgcccggaatatcattaatcaattcccatgcgcggttgcgctgttcatacaggcggccgcctggaacgataaactcgctgatgctttgatagccgccgagagctgtctggatcgcatgttgcgccggtacgttggcgcacagacgcatggatgccagcatctccagcccttcaatgtagcctttcgcatgttttttcggaccgttcagtaccatccagccctgacggaaaccggcaacgcggtaagttttagacagtccattaaaggtgaccgtcagcagatcgggcgccagcgcggcgatagagtggtgctgcgccgcgtcgtacaggatcttgtcgtaaatctcgtcggcaaagatgatcaggttgtgctggcgggcgatctcgacgatctccatcagcagctcttttgaatagaccgcacccgtcgggttattcgggttaatgatcacgataccccgggtgcgcggggtaattttggcgcgaatatcatccagatccgggaaccagtcagaggattcgtcgcacaggtagtgcaccgctttaccgctggacagggacaccgcagccgtccacagcggataatccggggcaggaaccagcatttcatcgccgctgttcaggagcgcctgcatcgcctgaacgatcagctccgagacaccgttgccaatgtagatatcttcaacggtgacgtcgcgcataccgcgagcctgatagtgctgcatgatggctttacgggcggaataaagcccttttgaatcgcagtagccttgtgcagtgggcaggttacggatcacatccaccaggatctcatccggcgcttcaaaaccaaatggcgcggggttgccgatgttgagtttcagaaccttattgccttcctcttcaaggcgttttgcctctttgagtaccgggccacggatgtcgtaacagacgttgtcgagcttgctggatttttcgataggggacatgaacctttaaccttttcgctattattgcaacttcctgccgtggaagtgagcacggaacaatgtactcccaccgcgcttcgttttgaagggcgcacagaagaagatttcgtccaaccgggcaatgccgcggtgatcgcttactctaacgacggagtgattttgtgcctgaatttatcgtgataaagaggggtgttgggttgtttgtgctaaaaatttcatataaagatgaatattattctggaataaataaaaagacgattcgggctgatgcattagtccccctgagtgaccattcgtaaaacctgaatgctaagataccgattgccatattagcaaagccaggttaaaagttactcatgtgaaattaatgttaagggttattaatgaatggcctgaatctaaattaaactttatttattattaacgacgaaaatgcaactttcgttaattttaataaaaagagtgtagttgcttatcattggcggtaaatccttaatattgcaataagacttataaatatagtggatttgggttaagatgtgtttcgggaatgcagcatagcgataggcctgttacgtatatcggatactgctttcctgtattaatcgattgttattgttaaaattatctctggctgattgggtaagtcacatcttgctacgttgccaacgctgcgatatagatggcagaaaacatgtcttactctttatggtattaacatcgacctgcaaacaacgaaatatcctggacgcaagagaataaaaataacgtcatgaaacgtgatttctgactggtgatataccgcagtacaataactatctgtcaggcagtctgccgggccgggatgcgagggaaactcttcagaaggaattgcttaactgttacacacagcttcaacccgggcagctccgcacgagcaacctgaaagtgaaaagatatgataaatgcaaatcgtccgataatgaatctcgacctcgatctgctgagaacgtttgttgcggtcgccgatctcaacacttttgcagcagctgctgccgccgtttgccgtacccagtccgccgtgagtcagcaaatgcagcggctggaacaactggttggtaaagagctttttgcgcgtcatggacgtaataagcttttaacagaacatggtattcagcttctgggttatgccagaaagatactgcgctttaatgatgaagcctgtatgtcattaatgtttagcaaccttcagggagtgttaacattaggggcgtcagatgaatcagcagataccattttacccttccttctcaaccgaattagctcggtttatccgaagcttgccctggacgttagcgttaaacgcaatgctttcatggttgagatgctgaaagaaaacgaggttgacctggtggtcaccacgcatcgacctggccagtttgacagcctgacgctgcgtacttctccaacgcactggtactgtgccgcggagtatgtattgcagaaaggtgagccgatacccctggtcctgctggacgatccgagtccgtttcgcgatatggtgctggctgcgctcaacgaagccggtattccatggcgcctggcgtacgtggcgtcaaccttgcccgcagtgcgagcggcggtgaaggccgggcttggcgtaacggcccgtccggtggagatgatgagccccgatctgcgtgtgctgggtcaatccgagggactcccgtcgttgccggatacggagtacctgctgtgccataacgccgccagcaacaacgagctggcaaaagtggtgttcgaggcaatggaaaactaccacaatccatggcagtacgcgcctgttactcccgaaggaggggacgactccctgatcgtggaaggggattttgagtgatcattccctcaaaattctcgtaacaaaatgtaagtgcaaaaaagagccactcgcatgattttttcctgcgagtggttttttttgctattcataaccgtgaacggagcagggataaagcaaataccgcttatttatcaatgcagaaaatgtttttggttaagatgtaaacaatacctgttctaacttacctcataccccgccgatgttaaaaaaacaggaaatatgttgctgtttttttgattgaattaacaaaagcgtgtctcagatcaagaaaatactcccatttggggggaggaatcgttggcaaatcctgtcaaaataggagggttnnnnnnnnnnnnnnnnnnnnnnnnnnnnnnnnnnnnnnnnnnnnnnnnnnnnnnnnnnnnnnnnnnnnnnnnnnnnnnnnnnnnnnnnnnnnnnnnnnnnnnnnnnnnnnnnnnnnnnnnnnnnnnnnnnnnnnnnnnnnnnnnnnnnnnnnnnnnnnnnnnnnnnnnnnnnnnnnnnnnnnnnnnnnnnnnnnnnnnnnnnnnnnnnnnnnnnnnnnnnnnnnnnnnnnnnnnnnnnnnnnnnnnnnnnnnnnnnnnnnnnnnnnnnnnnnnnnnnnnnnnnnnnnnnnnnnnnnnnnnnnnnnnnnnnnnnnnnnnnnnnnnnnnnnnnnnnnnnnnnnnnnnnnnnnnnnnnnnnnnnnnnnnagcgctttacctcttcgcgtggtctacctccattcgcgaaagtggttgggtgggctttgtcgaggccgcaattttcattttagtgttactggccggtctggtttatctggtgcgtattggcgcgctggactggacacctgtgcgttcacgccgtgaacacatcaacccggaaaacagtatctctaatcgtcagcagtaacagcgaggcaataagatggattatacgctcacccgcatagatcctaacggtgagaatgaccgttaccccctgcaaaaacaggagatcgtaaccgaccccctggagcaagaagtcaacaaaagcgtgtacatgggcaagctcgaacatgccatgcacgacatggtcaactggggtcgtaagaactccatctggccatacaactttggcctttcttgctgctacgttgaaatggtgacgtcattcactgcggtgcatgacgttgcgcgttttggggccgaggtactgcgtgcttctccacgtcaggctgacctgatggtggtggccgggacctgctttaccaagatggcaccggttattcagcgtctttatgaccagatgctggagccaaaatgggttatctccatgggcgcatgtgcaaactccggcggtatgtacgacatttattccgttgtgcagggcgttgataagttcattccggtggatgtgtacatcccgggctgcccgccgcgtccagaggcctatatgcaggcgctgatgctgctccaggagtcaattggtaaagaacgccgcccgctttcatgggttgttggcgatcagggtgtctatcgcgcgaacatgcagtctgagcgcgagcgtaaacgtggtgaacgtattgccgtcaccaacctgcgtacgcctgacgaaatttaatttgcgcctgtgggcctggagaacaccttcgcatatcactactcaaatagcgcgaagccaggcttaacagtcaccacggaccatttgcaatggtgaacaatatgaccgacttaaccgcgcaagaagccgcctggcagacccgggatcatctcgatgaccccgtcattggcgaactgcgcaaccgttttgggccggatgcctttactgttcaggccacccgcaccggggtacccgttgtttgggtgaagcgtgagcaattactggaagttgtcgatttcctcaagaaattgccaaaaccttacgtcatgctatttgacttacacggcatggacgaacgtctgagaacgcaccgccagggtctccctgctgcggatttttccgttttctaccacctgatctcaatagaccgcaacacggatatcatgctcaaggtggcattgtctgaaaacgacatgcatctgccgacgatcaccaaacttttcccgaacgccaactggtacgagcgtgaaacctgggaaatgttcggcatgaccttcgacggtcacccgcatctgacgcgcataatgatgccgcagacctggaccggccacccgctgcgtaaagactacccggcacgcgccaccgaattcgacccgtttgagctgaccaaagccaagcaggatctggagatggaagcgctgaccttcaagccggaagactggggcatgaagcgcggcaccgaaaacgaggacttcatgttcctcaacctcggtccaaaccacccgtctgcgcacggtgcattccgtattattcttcagcttgacggcgaagagattgtcgactgcgtgcctgacatcggctatcaccaccgtggtgccgagaagatgggcgagcgtcagtcctggcacagctacattccgtacaccgaccgtatcgaatacctcggcggctgcgtgaacgaaatgccatacgtgctggccgttgagaagctggcaggcatcaccgtcccggatcgcgttaacgtgattcgcgtgatgctgtctgaactgttccgtattaacagccacctgctgtacatctccacgttcattcaggacgtcggcgcgatgacgccggtcttcttcgcctttaccgaccgtcagaaaatctacgatctggtggaagcgattaccggtttccgtatgcacccggcctggttccgcatcggcggtgtggcgcacgatctgccgcgcggctgggaccgtctgctgcgtgaattcctcgactggatgccaaaacgtctggcgtcttacgagaaagccgcgctgcgtaactccatcctgaaaggccgttcccagggcgttgctgcctacggcgcgaaagaagcgctggagtggggaaccacaggtgcaggtctgcgtgcgaccgggattgatttcgacgtgcgtaaagcccgtccttactctggttacgagaacttcgactttgaagtcccggtgggcggcggcgtatccgactgctatacccgcgtgatgctgaaagtggaagagctgcgccagagcctgcgcatcctagagcagtgcctcaacaacatgccggaaggcccgttcaaggcggatcacccgctgacgacgccgccaccgaaagagcgcacgctgcaacatatcgaaaccctgatcacccacttcctgcaagtttcctggggcccggtcatgccggcacaggaatccttccagatgattgaagcgaccaagggtatcaacagctactacctcaccagcgacggcagcaccatgagctaccgcacccgcgtgcgtacgccaagcttcgcacacttgcagcagatcccggccgccattcgcggcagtctggtctccgacctgattgtgtatctgggtagtatcgattttgttatgtcagatgtggaccgctaattatgcacgagaatcaacaaccacaaaccgaggcttttgagctgagtgaagcagagcgtgccgccattgagcacgagatgcaccactacgaagacccgcgtgcggcgtccattgaagcgctgaaaatcgtacagaaacagcgtggttgggtgccggatggggcgatctacgagatcgcaaaagtgctgggcattccggcaagtgacgtagaaggcgtagccacgttctacagccagatcttccgtcagccggtaggccgccatgtgatccgctactgtgacagcgtggtctgccacatcaccggttatcagggcattcaggctgcgattgagaagaaactcaatatcaagccgggccagaccaccttcgacggacgctttactctgctgccaacctgctgcctgggtaactgcgacaaggggccgaccatgatgattgatgaggacactcacagccatctgacgccggaagcgattcctgacctgctggagcagtacaaatgaaaactgtaattcgtactgctgagacgcatccgctgacctggcgtctgcgtgatgacaaacagccggtctggctcgacgaatatcagagcaaaaacggctatgccggcgcgcgtaaagcccttggcggcatggcgccggacgacatcgttaacgcggtgaaagagtctggcctgaaaggccgcggcggcgcgggcttctccaccggtctgaagtggagcctgatgccgaaagatgaatccatgaacatccgttacctgctgtgtaacgccgatgaaatggagccgggtacctataaagaccgcctgctgatggaacagctgccgcacctgctggttgaaggcatgctgatctccgcgttcgcgctgaaagcgtaccgtggctatatcttcctgcgcggtgaatacatcgaagcggctgaaaacctgcgtcgcgcgattgccgaagccactgaagccggtctgctgggtaaaaacatcctgggcaccgggtttgacttcgagctgttcgtgcacaccggtgccggacgttatatctgcggtgaagaaaccgcgctgattaactccctggaaggccgccgcgcgaacccgcgctccaagccaccgttcccggcaagctccggcgtgtggggtaaaccgacctgcgtcaacaacgtcgaaaccctgtgcaacgtcccggcgatcctcgcgaacggcgtggagtggtatcagggcatctcctcaagcaaagatgccggtaccaagctgatgggcttctccggtcgcgtgaagaaccctggcgtctgggagctgccgttcggcaccaccgcacgcgaaattcttgaagactacgccggcggcatgcgcgatggcctgaaattcaaagcctggcagccgggtggggcagggacggacttcctgaccgaagcccaccttgacctgccaatggagttcgaaagcattggtaaagcaggcagccgtctgggtaccgcgctggcgatggccgtcgaccacgagatcggcatggtatccctggtgcgtaacctggaagagttcttcgcccgcgagtcctgcggctggtgtacaccgtgccgtgatggtctgccgtggagcgtgaagatcctgcgtgctatcgaacgtggcgaaggccagcctggcgatatcgagacacttgagcaactgtgtcgattcttagggccgggtaaaaccttctgtgcccacgcaccgggcgccgtcgagccgctgcaaagcgcgattaaatatttccgcgacgaattcgaagcaggcatcaagcagccgttcagcaatacccattcgatcaatggtattcagccgaacctgctgaaagcgcgctggtaaaaacagaattttgattaacgctcggtttcggccgagccaactggaagcatgctaatggctacgattcatgtagacggcaaagaatacgaagtcaacggggcggacaacctgctggaagcttgtctgtctcttggcctcgatattccgtacttttgctggcatccggcgctgggcagcgtcggtgcttgccgccagtgtgcggtgaagcaatatcaaaacgcggaagacacgcgtggtcgcctggtgatgtcctgtatgacgccagccgccgaaggcacctttatttcgattgatgacgaagaagccaaacagttccgtgaaagcgtggtggagtggttgatgaccaaccacccgcacgactgtccggtgtgtgaggagggcggtaactgccaccttcaggatatgaccgtcatgaccggtcacagcttccgtcgctatcgctttaccaagcgtacccaccgtaaccaggatctggggccgttcatctctcacgaaatgaaccgctgcatcgcctgctaccgctgcgtgcgttattacaaagattatgcagacggacaggatctgggcgtatatggcgcgcatgacaacgtctacttcggtcgtccggaagacggtacgctggaaagcgaattctccggtaacctggtagaaatctgtccgaccggcgtattcacggataaaacccactctgaacgttacaaccgtaaatgggacatgcagtttgcgccaagcatctgccagcagtgctcccttggctgtaacaccagcccgggtgaacgttacggcgaactgcgtcgtatcgaaaaccgttacaacggtacagttaaccactacttcctctgcgaccgcggtcgtttcggctatggctatgtgaacctgaaagaccgtccgcgtcagccggttcagcgccgtggcgatgacgtcattaccctgaacgctgagcaggcgatgcagggcgcggcagatattctgcgtcagtcgaagaaagtgatcggcatcggttccccgcgcgccagcatcgaaagcaacttcgcgctgcgcgagctggttggggcggaaaacttctataccggtatcgcccagggcgagcaggaacgtctccagctggtgctgaaagtgctgcgtgaaggcggcattcatacgcctgcgctgcgcgaaatcgaatcttatgatgcggttctggtgctgggtgaagacctgacgcagactggtgcacgcgcggctctggcggttcgtcaggcggtgaaaggcaaagcacgtgaaatggcagcggcgcagaaagtggctgactggcagattgcggccattcttaacatcggccagcgcgcgaagcatcctctgtttgtgactaacgtcgacaacacccgtctggacgatatcgccgcgtggacctactgcgcgccggttgaagatcaggcgcgcctcggctttgccattgcccacgcgctggacagcagctcgccggccgttgaactggatcgtgacctgcaaaacaaggtcgacgtgattgttcaggcgctggcgggggcgaagaaacctctgattatttccggtaccaacgccggtagcgctgaaatcattcaggccgcagcgaacgttgccaaagccctgaagggccgcggcgctgacgtcggagttaccatgattgcccgtgcggtgaacagcatcggtctgggtatgattggcggcggctcgctggaagacgcgttaagcgaactggaatccggtgccgctgacgccgttgtggtgctggaaaacgacctgcatcgccatgcttctgccgctcgcgttgacgccgcgctctccagagcgccgctggtgatggttatcgaccatcagcgcaccgcgatcatggacaaagcgcacctggttctctctgcggcaagcttcgcagaaagcgacgggacggtgatcaacaacgaaggccgcgcccagcgtttcttccaggtttatgacccggcttactacgacagcaacaccgtgatgctggaaagctggcgctggctgcactctctgcacagcaccgtgcagagccgtgaagtggactggacgcagctcgaccacgttatcgacgcggttgttgagaaactgcctcagctggcgggcattaaagacgccgcgccggacgcaagcttccgcattcgcggtcagaaactggcgcgtgagccgcaccgctacagcggtcgtaccgcgatgcgcgccaacatcagcgtgcacgaaccgcgtcagccgcaggataaagacaccatgtttgccttctcgatggaagggaacaaccagccgtctgcgccgcgttcgcaaatcccgtttgcatgggcaccgggctggaactccccgcaggcatggaacaagttccaggctgaagtgggcggtcacctgcgccacggcgatccgggcgtgcgtctgattgaagcctccgaaaccggtctggacttcttcaccaccgttccggcgagcttccaggcgcaggaaggtcactggcgtattgcaccgtactaccatctgttcggtagcgacgaaatgtcccagcgttctccggtattccagcagcgtatgccgcagccgtacatcaagctcaacccggcggatgccgcgaagcttggcgttaacgcgggtgcgaacattgcctttagctacgacggccagacaatcagcctgccgctgattatttctgaacgcctgtcagcagggcaggtgggtctgccgatgggtatgcctggcatcgcgccggtcctggcgggtgcgcatcttgataaccttcaggaggcaaaagcatgagttggttaacgccggatcttatcgacatcctgctgagcattctgaaagcggttgtgattctgctggtggttgtcacctgcggcgcgttcatgagctttggtgaacgtcgtctgctcggtctgttccagaaccgttacggaccgaaccgcgtgggctggggtggttcactccagctggtcgcggacatgatcaagatgttctttaaagaggactgggttccacgcttctcggaccgcgtgatctttacgctggcgccgatgatcgccttcacctcgctgctgctggcgtttgctatcgttccggtcagcccgacctgggtggtggctgacctgaacatcggcattctgttcttcctgatgatggcaggcctcgcggtttacgcggtgctgttcgcaggctggtccagtaacaacaaatactcgctgctgggtgcgatgcgtgcttccgcgcagacgctgagctacgaagtgttcctgggtctctccctgatgggcgtggtggcgcaggccggttcatttaacatgaccgacatcgtcaacaaccaggccgacatctggaacgttatcccgcagttctttgggtttattacctttgccatcgcgggcgtggcggtgtgtcaccgtcacccgtttgaccagccagaagccgaacaggaactggccgacggttaccacattgaatattccggtatgaagttcggtctgttcttcgtgggcgagtacatcggtatcgtcaccatttccgcgttgatggtaacgctgttctttggtggctggcatggcccgttcttaccgccgttcatctggttcgcgctgaaaaccgcgttcttcatgatgatgttcattttgattcgcgcagcgttaccgcgtccgcgttatgaccaggtaatgtccttcggctggaaagtgtgcctgccgctgacgctcgtcaacttgttggtaacggcggctgtcattctctggcagcagccataaggggctttgagatcatgaccttaaaagaattattggtaggtttcggcacccaggtacgcagtatctggatgatcggcctgcatgcgtttgccaaacgtgaaacccggatgtacccggaagagccggtatatctgccgccgcgctaccgtggacgtatcgtgctgacgcgcgacccggacggttccgagcgttgcgttgcctgtaacctgtgtgcggtagcgtgtccggtgggctgtatctctctgcaaaaagcagagacggtagacggccgctggtaccctgagttcttccgcatcaacttctcacgctgcattttctgcggtctgtgtgaagaagcgtgcccaaccacggcgattcagctgactccagacttcgagctgggtgagtacaagcgtcaggatctggtgtacgagaaagaggatctgctgatttccggtccgggcaaatacccggaatataacttctaccggatggcgggtatggcaatcgacggcaaagataaaggcgaagcagagaacgaagctaagcctatcgacgtcaagagcctgttaccgtaaggagagggcaatggaattcgctttttatatctgtggccttatcgccatcctggctacgctgcgagtgatcacgcacaccaatccggtgcatgcgctgctgtatttaatcatttcgctgctggctatttccggggtgttctttgcgctgggcgcgcacttcgctggtgcgctggaaatcatcgtctacgccggggccatcatggtgctgtttgtgttcgtggtgatgatgctcaacctgggcggctctgaaattgagcaggaacgtcagtggttaaaaccgcaggtgtggattggcccggcgattctgtcggccatcatgctggcggtgattgtttacgccattctgggcgtcaacgaccagggtatcgacgggacgccaatcagcgcgaaagccgtgggtatcaccctgtttggtccgtacgttctggcggttgagctggcctcaatgctgctgctggcgggtctggttgtggccttccacgttggccgcgaagagcgtgtcggcgaggtgctgagcaaccgcactgacgaccgcgcgaaaagaaaaacggaggaacgcgcatgatccccttaacacatggactgatcctcgctgcgattttattcgttctgggcttaactggtctggttatccgccgcaatctactgtttatgctgatcggtctggaaatcatgatcaacgcttccgcgctggcctttgtggtcgccggtagctactggggccagaccgatggtcaggtgatgtacattctcgccatcagcctcgcggctgctgaagcgagtattggcctggcgctgttgctacagctccatcgtcgccgccagaacctgaacatcgattcagtaagtgagttgcgtggatgaacatgcttgccttaaccattatttttccgctgattggcttcgtgctgctggcgttttctcgcggccgctggtctgagaatctgtctgccaccgtgggcattggctctatcggcctggctgcgctggtcacagcgtatgcgggtatcgacttctttaacaatggacgtcaggcctacagcgtaccgctgtggaactggatgtcggtcggtaacttcaacatcggtttcaacctggtgctggatggtctgtctctgaccatgctctccgtggtcaccggcgtcggcttcctgatccacatgttcgcctcctggtacatgcgcggtgaagagggatactcccgcttcttcgcctacaccaacctgtttatcgccagcatggtggttctggtgctggccgataacctgctgctgatgtatctgggctgggaaggcgtgggtctgtgttcttacctgctgatcggtttctactacaccgatccgaagaatggcgcagcggccatgaaagcgttcgtcgtgacccgtgtgggtgacgtgttcctcgctttcgcgctgttcattctctacaacgaactgggcacgctgaacttccgcgaaatggtggaactggcgccggcgcacttcgaagcaggcaacaacatgctgtggtgggcaacgctgatgctgctgggtggcgctgtgggtaaatccgcgcagctgccgttgcagacatggctggccgacgcgatggcgggtccaacccctgtctccgcgttgatccacgccgcgaccatggtcaccgccggtgtctacctgattgcgcgtacccatggcctgttcctgatgaccccggaaattctgcatctggtgggtattgtcggtgcggttacgctggtgctggcaggctttgccgcgctggtgcagaccgacatcaagcgcgtgctcgcgtactccaccatgagccagattggttacatgttcctggcgctgggcgttcaggcgtgggacgcggccattttccacctgatgacgcacgcgttctttaaagcgctgctgttcctctcatccggttcggtgattctggcctgccaccacgagcagaacatcttcaaaatgggcggactgcgtaagtccatcccgctggtttatgtctgcttcctggtaggcggcgcggcgctggcggcactgccgctgattaccgcaggcttcttcagtaaagacgaaatcctggcgggcgccatggcgaatggtcatatcaatctgatggttgcgggtctggtcggtgcgtttatgacctccctgtacaccttccgtatgattttcatcgtcttccacggtaaagaacaaattcacgctcacgcagggaaggggattacccaccacctgccgctgattgtgctgctggtcctgtccaccttcgttggcgcgatgattgtgccaccgttgcagggcgtactgccggcgacaaccgagcttgagcacggtcgcgttctgacgcttgaaatcacctccggcgttgtggctatcgcgggcatcctgattgccgcatggctgtggctgggtaaacgcacgctggtgacagccgttgccaacagcgcgccgggccgtctgctgggcacctggtggtacaacgcatggggcttcgactggctgtacgacatgatcttcgtgaagccgttcctgggcattgcgtggctgctgaagcgcgatccactgaacagcctgatgaatatcccggcgatcctctctcgctttgcaggtaaaggcctgctgttcagcgagaacggttatctgcgctggtatgtggcgtccatgagcatcggtgcggttgtcatactggcgctgctgatggtgttgcgttgattttgagttagcggggattgtctacggaccgtaggcccggtaagcgaagcgccaccgggcaaaaggccccgcactcaaacgtgaattttattcgaattcgttgaaaatcaggcccctgctgggggccttaaaaaggaatgtaaatcgccatgttactaccctggctaatattaattcccttcatcggcggcttcctgtgctggcagaccgaacgctttggcgtgaagatgccgcgctggatcgcgctgatcaccatgggattgacgctcgcgcttggcctgcaactgtggttgcagggtggctactcactgacccagtctgcgggccttccgcagtggcagtctgagttcattctgccgtggatcccacgtttcggtatcacgatccacctcgcgattgacggtctgtcgctgctgatggtcgtgctgaccggtctgctcggcgttctggcggtactctgctcctggcgagaaatcgaaaaataccagggcttcttccacctgaacctgatgtggatcctgggcggcgtgatcggcgtgttcctggccatcgacatgttcctgttcttcttcttctgggagatgatgctggtgccgatgtacttcctgatcgcgctgtggggccataaggcgtccgacggtaaaacgcgtatcacggcggccaccaagttcttcatctatacccaggcgagtggtctggtgatgctgatagccatcctggcgctggtatttgtgcattacaatgcgaccggcgtctggaccttcaactatgaagatctgctgaagaccccgatgtcccacggcgtggaatacctgctgatgctcggcttcttcatcgccttcgcggtgaaaatgccggtcgtaccgctgcacggctggctgccggacgcgcactctcaggcgccaacggcgggttccgttgacctggcgggtatcttgctgaaaacggcggcctacggtctgctgcgtttctccctgccgctgttcccgaacgcctccgcagagttcgcgccgattgccatgtggctgggcgtgatcggtatcttctacggtgcatggatggccttcacgcagtacgacatcaaacgtctgattgcttacacctccgtttcccacatgggcttcgtgctgattgccatctacaccggcagccagctggcgtaccagggggcggtgatccagatgattgcgcacggcctgtccgctgccggtctcttcatcctgtgtggtcagctgtacgaacgtctgcatacccgcgacatgcgtatgatgggcggcctgtggggcaaaatgaaatggctgccggcgctctccatgttcttcgcggtggcgactctgggtatgccgggtaccggtaacttcgtcggcgagtttatgatcctgttcggcagcttcaacgtggtaccgacgatcaccgtcatctccacctttggtctggtatttgcctccgtgtactcgctggcgatgctgcaccgcgcttacttcggtaaagcgaagagtgaaattgctgcacaagaactgccggggatgtcgctgcgtgagctgttcatcatcctgctgctggtcgtactgctggtgctgttgggcttctatccgcagccgattctggatacctcgcactccgcgatgggtaacatccagcagtggtttgttaattctgcttctactacaaggccgtaattcgccatgacaataactccacaacaactgatcgcgctgctaccgctgctgatcgtcggattgacggtggtggttgtgatgctctccattgcgtggcgacgcaatcacttcctgaatgcgaccctgtccgttctgggtctgaacgctgcgttagtttccctctggtttgttggccaggcgggagcgatggacgtcacgccgctgatgcgcgttgacggttacgccatgctctacaccggtctggtgctgctggcgagcctggcaacctgtacctttgcgtacccgtggctcgaaggttacaacgacaacaaagaagagttttacctgctggtactgattgccgcactgggcggtattctgctggcgaacgcgaaccacctggccgcgctgttcctcggtattgagctgatctcactcccgctgttcggcctgattggttacgctttccgccagaagcgctctctggaagcggcaatcaagtacacgatcctgtctgctgccgcgtcgtcgttcctgctgttcggtatcgcgctgctgtacgcacagacggggaacctctccttcatggcgctcggtaagagcctcggcgacggcatgatgcatgagccgctgctgctggcgggtctgggcatgatgattgttggccttggctttaaactctcactggttccgttccacctgtggacgccagacgtataccagggtgcccctgcaccggtctcgaccttcctggcgacggcgagcaaaatcgctatcttcggtgtggtcatgcgtctgttcctgtacgccccggtgggtgacagcgaagcggtccgcgtggtgctgggcattatcgcgttcgtgtccatcatcttcggtaacctgatggcgctgagccagaccaacatcaagcgtctgctgggctactcctctatctcccatctgggttacctgctggtggcgctgattgcgctgcaaagcggtgagatgtcgatggaaactgtgggcgtctatctggccggttacctgtttagcagcctcggcgcgttcggcgtggtgagcctgatgtccagcccgtaccgtggcccggatgcggattccctgttctcctaccgtggtctgttctggcaccgtccgattctgtctgcggtaatgaccgtgatgatgctctctctggcgggtatcccgatgacgctgggctttatcggtaagttctacgtgctggccgtcggtgtgcaggcgggtctgtggtggctgacggcgggtgtcgttatcggctccgcgattggtctctactactacctgcgcgttgccgtgagcctgtacctgagcgcgcctcagcagctcaaccgcgatgcgccgtccaactggcagtatagcgccggcggtatcgtggtgctgatctccgcgctgctggtgctgatcttcggtatctatccgcagccgctgattgatatcgtgcagcgcgcgatgccgctgatgtaaaaacaaaaaaccnnnnnnnnnnnnnnnnnnnnnnnnnnnnnnnnnnnnnnnnnnnnnnnnnnnnnnnnnnnnnnnnnnnnnnnnnnnnnnnnnnnnnnnnnnnnnnnnnnnnnnnnnnnnnnnnnnnnnnnnnnnnnnnnnnnnnnnnnnnnnnnnnnnnnnnnnnnnnnnnnnnnnnnnnnnnnnnnnnnnnnnnnnnnnnnnnnnnnnnnnnnnnnnnnnnnnnnnnnnnnnnnnnnnnnnnnnnnnnnnnnnnnnnnnnnnnnnnnnnnnnnnnnnnnnnnnnnnnnnnnnnnnnnnnnnnnnnnnnnnnnnnnnnnnnnnnnnnnnnnnnnnnnnnnnnnnnnnnnnnnnnnnnnnnnnnnnnnnnnnnnnnnnnnnnnnnnnnnnnnnnnnnnnnnnnnnnnnnnnnnnnnnnnnnnnnnnnnnnnnnnnnnnnnnnnnnnnnnnnnnnnnnnnncaccagcccgcacagagtaaaacatgcccagcggcgctacgcttgcagggcctacgggtcctgtagatcgggtaagcgtagcgccacccgactaagccagctgcttgcggctaatcaacggcccttcaatcttcttcatcgagcggtccagcacctcttcaattaccgacgacagctcgttcagctcaaacttcgccacatagccgtccgccttcactttgcgaatatgatcttcgttcgcgttgccggaaagagacgagtggatcaccaccggaatatctttcagtaccgggtcggatttgatttttcgcgtcagcgtaaatccgtccatctccggcatttcgaggtcggttaataccagggcaatcttatcggtaacgggaacgccctcggcctgtgcctgcgcggccagctgagtgattttctcccacgcgtctttgccggtgatatgcagctgggccgggatctccatcgcctgcaatcccttctccagcattgagcgcgctacttttgaatcttctgcaacaatcgcgacagagccaggcttgatgttgaatttggtggtttccagatgggtggcgtgcagatcgtggttcgccggggtgatgtcgtacaggatctgctccacgtccagcaccatcgccagatcgttagtatcggtcttctcatccagacaggcaatgctggtgatgtagcgaccgctgacggcggtttccgcggcgtgcacctgcttccagtccagacgcatgatgttttccaccgattccacggcaaacgcctgcacgctgcgggcatattcggtgatcagcaggatgttcagcccggtggctggtttgcagccggcgacggcggccagatcgatcaccgggatcacctggtcacgaatgttcaccatccccatcagcggagacttcattcccgccggtttggtgaaggtcggcatcggcacaatttcgcgcaatttgaatacgttgatgccgaacagctcggatttattttcgttcagagaggtgccaagacggaacagcaacagttcaaaacggttggacagggtcaggtttgccctgtcatcaatatctttctggaaattatccattctaccctcaagagaaatgctggccttttaatcgttatcggcacgctgagggaaaaatgaaggactaaacgctgacctgagcaaaatcttccgccagctcgcatgccggaaatacttcccggcactctgccagcaggctttcagcgccgcggacgtcatagcgtgagctgacgtgagtaacaatcagtttccggacgccagcctcacgtgccagctgcgccgcctgacgcgtagagctgtgcccccggctgttggctttttcttccatcgccgcttccagcgtcgcctcatgcaccatcacatctacacctctggcaagcctgagcgccgaagggcagggggcggtatccccaaaaatagccagttttttgcccggctgcggtggggcgaggtaatcctgaccgttgatgacgcgcccgtcttccagcgtgacggtctcgccgtgcttcagacgctggaacagcgggcctggtttcaccccatcggcctgcaacgcggcggcgttcagcgccccgggcttgtcatgctcctcaacgcgatagccgtagcattccaccggatggttaagcgggtaagcgcgcaccaggtaatctccgtcatcgaacaccagaccctcgccgatctctaacacctccagcggataatcggtccacgagccgctcaggcgcagcgtggtttcaacgaattcctgaatacccgcggggccataaatggtcagcgggttagcgttaccggccatcgaacggctgcacagcaggcccggcaggccaaacagatggtcgccgtgcagatgggtgataaatattttatccactttccccgggtggtatgaggtatgcagcagctgatgttgcgtaccctcgccgcagtcaaacagccacagcccaccgcgggtaggatgcttaagatccagcagaatcgccgtcacgtttcgtgagcgggttggcaccccggcggacgtacccagaaaaatcagttccataacgcaatcagccctttgccgaatgggaaggggtttagtataacgtgatgaacaccaggaaggagaaacacatgatccagtggcaagatctacaccacagcgaactgaccgtgcattcactctacgccctgctcaagctgcgctgcgaagtctttgtggttgaacaaacctgcccgtatcaggatatcgacggcgatgacctgatcggcgagaaccggcacatcctcggctggcgcgataacgagctggtggcgtatgcgaggattctgaaaagcgaagaggattttgaccctgtcgtcattggccgcgtcattatcagcggccgcgcgcgcggtaaaaagctgggctatcagctgatggaaaaaacgctggacgcatgccagaaacagtggccggacaaggcgttatacctgggcgcgcaggcgcatttgcaatcattctatggccattttggttttaccccggtcacggacatttacgacgaagatggcatcccacacatcggcatggcacgcgaagcgaaacaggcgcaatagcaatacgttgtctatagttaccggactggtgtactaacatggagaaaaatatgtcatttcaatcctgggatacccgagtcgacgacgacctgacgctgctaagcgaaacgctggaagaagtgctgcgctcttcaggcgatcctgccgatcagaagtacattgagctcaaagcccgcgccgagcaggcgctgcatgacgtgaaaaaccgcgtcagtaacgcctccgacaattactactaccgcgccaagcaggcggtttatcgtgccgacgattatgtgcatgaaaaaccgtggcagggcattggggtcggtgcggccgtagggctggtgctgggtctgctgttagcccgtcgttaagccggtaaaccactccctacacgtgggtactgctatttatcgtcagtaccccgtataatataaggctttaacagggagaggttcgcgtgcactcgattttcctcgcgctgcaaagcctgcgtactcagcttgcgcaagcattgccagctacacccggtttacgccatttcgatgtctctttcccgttaaacgacgccttcgatccgctgacctggctcggtgtgcagcgatgctatcctcagttttactggcaacagcgcagcggtgatgaagaacttgccgcgctcggaagcctcgcccatttcgattctctggcctcggcctcgcggtttttgcacacccacgacgtagccaatgacacccgtatctgcggcctgaacgccttcaacccggcgcagggcaagttgtttttaccgcgccttctctggcgacggtctggcggggtcgccacgctgcgtctgcaactgtggagcgaaacgtcgctgcgggaagatgcccgtgaggcgctgaattttgtcgataacctgtgcgacgccgcgccgatccgcccgttgtccgtgcagattgtgcaggaaacccatcatccggaaaaaccggaatggctggcgttgattcgtcaggcgacggatacccttgctcgcggcgattttgagaaagtggtcctcgcacgtgctacagacgtgcattgccagcagcccgtgaacgccatcgcgctgatggctgccagccgcgcgctaaacctcaactgctatcatttttgtatggtctttgacgccagcaacgcgttcctcggctcgacgcctgaacgcctgtggcggcgacgcggcacgctgctgcgcactgaagcgctggcaggcaccgtcgccagccattctgacgataagcaggcccagcgtctgggcgactggctgatgaatgacgacaaaaatcagcgggaaaatatgctggtggtggaagatatctgccagcgtcttcagcaccatacccggacgctggagatcctgcctgcgcaggtgctgcgtctgcgcaaggtgcagcatttacgtcgctgtatctggaccaaacttaaacagcctgacgacgagcagtgcctgcatattctgcaaccgacggcggcggtggccgggctgccgcgacaggcggcgcgagaatttattgcgaaagtggagccgtttgaccgggagtggtacgccgggtcggcgggctatttatcgcgcgatcaaagcgaattctgtgtggcattacgctccgcccgcgttaacgacgctgcgctgcgtctttatgcgggggcgggcatcgtcagcggctccgatccggagcaggagtggcaggagatcgaaaacaaggccgccgggctgcgttcccttctcctaagggattaatactgattcgtgcaatcccgattcatatcaaaattctgactttttctattatttatactgtgtcgcattcttgatactggacaatctcatgtcagtaagttcttttaaccgacgctgggcggcggtgatccttgaagccctgacccgtcatggtgtcaggcatgtgtgtattgccccgggctctcgctccacgccgctcacccttgctgccgcggaaaaccgggcttttattcaccacacccattttgatgagcggggtctgggccatctggcgctcgggctggcgaaagtcagcaaagcgcccgtggcggtgatagtcacctccggcacggcggtggcgaacctctatccggcgctgatagaagcgggattaaccggcgaaaagctgattttactcactgccgaccgtcccccggaacttattgactgcggtgctaatcaggcgattcgtcagcctggcatttttgcctcgcatccttcacagacggtctcgttgccgcgccccacccaggatattcccgccagctggctggtctcaaccctcgaccacgccatgaacgcactgcgcagcggcgggctgcacattaactgcccgtttgccgagccgctgtacggtgaaatgaacgatactggcctcgtctggcaacagcagctgggagactggtgggagagcgaaaaaccctggctgcgcgagcagacgcatctggaaagcgcaaaacagcgcgactggttcttctggcgccagaagcgcggcgtggtgattgccgggcgcatgagtgcggcggaaggcaagctggcggcggagtgggcacaaacgcttggctggccgctgattggtgacgtgctttcccagacgggccagccgctgccctgcgccgacctctggctggggaacgcgaaagcggtcaccgagctggcgcaggcgcagattgtcgtccagttgggatcgagtctgacgggtaagcgtctgctccagtggcaggccacctgtacgcctgaagagtactggctggtggacccgctcgaaggacgccttgacccggcgcaccatcgtggccgccgcctggtgagcgatattgacagctggctggaattgcatccggcggaaaaacgcaaaccctgggcggtggagatcccggcgctgtcacgtcaggcgtgggaactcaccaaaacgcagtgcgaggcgttcagtgaagccgggcttgcgcaccgtatccgcaaatatcttcccgagcagggacaactttttgtcggtaacagcctggtggtgcgcctgattgacgccttttcgcagctgccggcgggttatccggtgtacagcaaccggggcgcgagcggcattgacggcctgatctccacagccgctggcgtacagcgggccagcgcgaaatccacgctggcgattgtgggggatctctcagccctctacgatctcaacgcgctggcgctcctgcgtcaggcgtcggccccgttcgtgctgattgttgtgaacaataacggcgggcagattttctcgttgctgccgacgccgcaaagcgagcgtgagcgcttctatctgatgccgcaaaacgtgcagttcgaacacgccgccgccatgttcagcctgaagtaccatcgcccggaaaactgggacgcgctggagacggcgctgaacaccgcctggcggcagcctggcgcgacgctgattgagctggtggtaaacgatgctgacggcgcgcagaagctgcaacatctgcttgcgcaggtgagtcacctgtgatcctcgcaggcttctcccagccaggaaaaccaggctacccctggctggttttcctgcacggtttttccggcgactgtcgcgagtggcaggctgttggggcgtcgctgcatgactacccccggctctaccttgacctgcccgggcacggtggttcagcagatacgggcgtgacggggtttgcagaggtaaatgaattgctctcgcatacccttattagttacaacatactaagatactggctcgtggggtactccctcggcggccgcattgcgatgttccatgcctgccagcatcctgcggggttggacgggctgatggtggaaggtggacacccgggcctgcaagacgccgatgcgcgccaggcccggctgatctctgaccgccgctgggcgtcacggtttcgcagtgagccgctggaggccgtctttgccgactggtatcaacagccggtctttgcctcacttacggatgatcagcgcagggcgctgatcgcgctgcgcagccggaacaacggcccgaggctggcagagatgctggaggccacctcgcttgccnnnnnnnnnnnnnnnnnnnnnnnnnnnnnnnnnnnnnnnnnnnnnnnnnnnnnnnnnnnnnnnnnnnnnnnnnnnnnnnnnnnnnnnnnnnnnnnnnnnnnnnnnnnnnnnnnnnnnnnnnnnnnnnnnnnnnnnnnnnnnnnnnnnnnnnnnnnnnnnnnnnnnnnnnnnnnnnnnnnnnnnnnnnnnnnnnnnnnnnnnnnnnnnnnnnnnnnnnnnnnnnnnnnnnnnnnnnnnnnnnnnnnnnnnnnnnnnnnnnnnnnnnnnnnnnnnnnnnnnnnnnnnnnnnnnnnnnnnnnnnnnnnnnnnnnnnnnnnnnnnnnnnnnnnnnnnnnnnnnnnnnnnnnnnnnnnnnnnnnnnnnnnnnnnnnnnnnnnnnnnnnnnnnnnnnnnnnnnnnnnnnnnnnnnnnnnnnnnnnnnnnnnnnnnnnnnnnnnnnnnnnnnnnnnnnnnngatttttcttttgactatctctatggcgaacgtgacgggaagtttgcagctatcgccgctgaaattaacgccacgcgtcatgctatccctcacgccggacacaacgcccaccgggacaacccggacgcggttgccgcgagtctggctcagatactgcgttatcgaacaaaggacacgctatgatctatcctgatgaacacatgctttacgcgccggttgaatggcaggactgctccgaaggctacaccgacattcgttaccacaaatccgccgatggtatcgccaaaattactatcaaccgtccacaggtgcgcaacgcatttcgtccgctgaccgtaaaagagatgatccaggcgctggcggatgcccgctacgacgacactatcggcgtcatcatcctcaccggggaaggggagaaagccttctgctccggcggcgatcagaaagtccgcggtgactacggcggataccaggatgatgcgggcacgcaccacctgaacgtgctggatttccagcgccagatccgcacctgtccaaaaccggtggtcgcgatggtggcagggtattccatcggcggcggtcacgtgctgcacatgatgtgtgacctgacgatcgcggcggaaaatgccattttcggtcagactggcccgaaagtcggctctttcgacggcggctggggcgcgtcctatatggcgcgcattgtcggtcagaaaaaagcccgcgaaatctggttcctgtgccgtcagtacaacgcccaggaagcgctggatatggggctggttaacaccgtggtgccgatcgccgatctggaaaaagagaccgtgcgctggtgtcgcgaaatgctgcaaaacagcccaatggcgctgcgctgcctgaaagcggccctcaacgccgactgtgacggtcaggcgggccttcaggagctggcaggtaacgccaccatgctgttctatatgaccgaagagggtcaggaagggcgcaacgcgttcaacgaaaaacgccagccggacttcagcaaatacaaacggaacccgtaatgcgttgcgcgcaggtttaccgctggcagataccgatggacgcgggcgtggtgctgcgtgaacggcggttaaaaacccgtgacggcttttgcgtgcatctccggcagggcgagcgggaagggtggggcgaaatcgccccgcttccgggttttagcctggaaacgctggacgaggcgcaggctgcgctgatggcctggacgtacgaatggcgtgagggggcagctccggcgctgccggacatgccttccgccgcattcggcatcagctgtgcgctggcagagctggacggcagtttgccggacgcggcgaactatcgcgccgcgccgctctgtaccggcgatccggatgaacttttcgcgctcctttccgcgatgcctggcgagaaggtggcgaaaataaaggttggcctgtacgaagcagtgcgcgacggaatggtggttaacctgttactggaagccattcccgatctgcacctgcgcctggacgccaaccgcgcctggacgccgctcagggcgcaacagtttgcgaagtacgtcaacccggcgtaccgcagccgcatcgcgtttctcgaagagccgtgcaaaacgcgcgacgactcgcgcgcctttgcccgggaaaccggcattgccattgcctgggatgagagcctgcgcgaagccgatttcgcgtttgccgccgagccgggcgtcagggccgtggtgattaagccaacgctgaccggcagcctcgacaaggtgcgcgagcaggttgcggcggcccatgccgcagggctgacggcggtgatcagttcatccatcgaatccagcctcggcctgacgcagctggcgcgcatcgctgcatggttaacgccggacaccgttcccggtctcgatacgctaaacctgatgcaggcccagctgattcgtcagtggcctggcagcaccttgccgtgcctcgacgtcggggcgctggagccattgcgatgagttttaccgactggccgtggcggcactggcgcacccggagtgccaataaacccgcgctgcgtttagacgatataacgctcagctggtctcagctgggcgagcgtatcgatcgtctcgcagccggttttcagtctcagggcgttacggacggtgacggcgtcatgctgctcgcccacaaccacccgcagaccctgctggcctggctggcgctgcttcagtgcggcgcccgcattttgccggtgaaccctcagcttccccgtccgctgctggacgtcctcctgccgcagatgaccctgcgttttgcgctggtgcttaacggtgagtatgacggtctgcccgggctggcaataagagatggcgaggggcagggcggcgtgacgtggcgggcagaacggctggcctcaatgacgctcacctctggctccaccggcttgccgaaagcggcggtgcacacctgtgccgcccaccttgccagcgcaaagggcgtgctggcgctgatgccttacggcggtagcgacgactggctgctctctctgccgctgtttcacgtctccggtcaggggattttgtggcgctggttgcagggcggaggccgtctcaccgtgcgtgaaaaacagccgctggagcaggcgctacagggctgtacccacgcctcgctggtgccaacgcagctgtggcggctgcttaattcacaccatctcgtcgcgctgaaagccgtgctgctcggcggggcggaaatccccgttgcgctgaccgaacaggcgcgtgagcaggggatccgtacgttctgcggctacggtctgaccgagttcgcctccaccgtctgcgccaaagaggccgacggcgcgccggacgtgggcagcgcgctgccgggcagagacgttcaggtggtgaacggtgaagtctggctccgggcggaaagcatggcggcgggctactggcgagacggcgcattattgccgctggtcaatgagcagggctggtttgccacccgcgatcgcggcgagtggcatgacggacgcctgaccattctgggccgaatggacaatctctttttcagcggtggagaagggatccagcccgaagcgctggagcgcgttatcgccacgcatccgcaggtaagccaggcgtttgtcgttccgctggatgatgccgagtacgggcaacgtccggtggcggtagtggaatgcgagccgggcacggatatcacgctgctgccggagtgggttcagggcaggctggcgcgctttgagcagccggtacactggctggcgctgccgtcagaactgaaaaatggcgggattaaaatctcccgccaggcgttaaagcagtgggtcaatgccctgttgaggggctaatcagccgatatccggctgcggtttgtgctggcgtcggcggatccagcgcagcaccggcggcacgacaatcaccataatcgccattgccagcaggatcttcgtcacgctgctctcccacaggatccccatgttgccattgctgatggagagggcgcggcgcaggttctgctccagcatttcccccagcacaaaccctaaaatcagcggcgacattgggaagtgcatcttgcgcagaatgtagcccagcacgccgagcagcaccatcaacaccaggtcgaaggtggtgctgtgcaccgcgtacaccccaaccgcagagacggcggcgatggccgggaccaggaaccacaggggaatggtcagcatgcgggtgaacaggccgatcagcgggatgttcattaccagcaacatcacgttggcgatcagcagggcggcaattaaaccccagacgatatcgggctgctcggtaaacatcgccggacccggggtgatgttatagagcgtcagcgcgcccatcattaccgccgtggtgccggagcccggcacgccgagggtcagcatcgggataaacgagccgcaggccgaggcgttattcgccgcctccggcgccgccacgccgcggatatcgcctttgccgaagctgtcgctgttaccgctcagctttttctcggtcatgtaggtgatagcgctggcgatagtagcccccgcgccgggcagaatgccgacgaagaaaccgatcaccgacgaacgcagggtggcgccaatacactgcgccccctctttggcattaaagagcatacgtccggttttacgcaccagcgtctgcccgctgctggtatgctccagcatcagtaagatttctgagacagagaacagaccaatcaccacgacgataaactgcacgccgtcggagagatgaacgctgtcgaaggtaaaacgataaaccccggtgttggcatccacgccgacggtggccagactgaggccaatcaacgcagacaaaaacgacttcagcggattctgcgccatcatgctgccgagacaggcgatggcgaacaccatcagggcaaaatactcggccggaccaaacgccagcgaccactgggccagcgccggggcgaagaggatgatgccgccaatggcgatcatggagccaaagaacgagctgacggcagaaatagagagcgccacgccgccgcgcccctgctgcgccatcgggtagccatccagcgcggtcataatggcggcggcatcgccgggcacgttaagcagaatcgaggaaatacgccccccgtattcgcagccgatatagaccgtcgccagcaggatcagcgccgattccgcaggcaggtgtagcgcaaaggccagcggcagtaaaatcgccacgccgttgatagggccaaggcccggcagcaggccgacgatggtcccgacgaaacagccgatcagggcgatcaccaggttttccggggtcatcgctaccgcgaacccctgagagagatagatccaggtatccatagcgtgctccgttagttaaaccatgcgccgagcggcagggtcacgtccagcaggcggtcgaaggcgtaccagagtaaaatgcccagtacgaccccggagatccccgccgcaggcagcgaggcgttaaacagtatgccaatcaccatcgtcagcagggcggtggcaatcgggaagccgagccactcaaagccccacgcatacatcagcaggacaattaccattaccagcagacgttgcagcgtacggcgtggcggccactccacggtatccggatggcgcagcagcagcgccaccgagcagagcagcatcaggccgacaatgccgacggggaaggggcgtggccccacgggttcatagctgtattcgctgtggatctgccaggcgacgaacatgccgccaatgcagagcagcagccatatcccggcaaaaatgcgatcgctcatagcgcctccggttatttcgccagaccaaaggctttcgcctgttctcggtagtcattcacctgttttttgacatactcgtccagctgcttgccgttcaggttgaactcaaacagcccgcgcagatcgcgctgttttttgaactcctcggtttgctgaagttttgcgaaggtatccacccaccactggtactcggcgtcggtcacttttggcccgacgaagaagccgcggatgatcggccagaccaggttataaccctgctctttggcggttgggacgtctgccagctggcccggcagacggttttccgagaagaccgccagcacgcggatcttatccccgctcaggtagggcaccatttcgctgagatcgcccgataccgcctggacgtgattgcccatcagcgccgtcaccggctcgccgccgccttcaaaggccacgtaacgcatcttgtgcggatccactttggcctgctgcgccagcagcgcggctttcatccagtcctggctgccgatagaggcgcccgcgccaatgaccacgctgttcggatctttttccatggcggtcagcagatctttcagggatttccacggggagtccgcgcgcacggcgatcatgccgtaatcagtgcctacggtggcgagccagcgcacgtcattcacgtcataacgaccaaatttcccctgcgacaggttcagcagcgaaccgccggagaaggccaccacggtgcccgcttcggcagggcgctgcgcgacgatggcgttataggctaccgcgcccacgccgccgggcatgtaggtgacgcgcatcggtttttcaatggccttcgtctccagcaggctgacctgaatcagcttacaggtcaggtcgaagccgccgccgggtttggccggggcgatacattcggtacgggatggcgcgtcctgcgcctggacgacagaggcactcaacagcaatacgcttgcagcaagggtagaaagtaattgttttttcatcgtttatcctcacgccggagaaccgggagtacgggtacgggtgtattttttctgattatgtgaaccaccttgtagcggttccgttgcgtgattgttaaaacaataacctttcatttccctttcactgcgacaccaactttacaggatgtgatatgcgtctcttactcgcggaagataatcgtgagctggctcactggctggaaaaagcgctggtacaaaacggatttgccgtggattgcgtcaacgatggacgggcggccgatcatcttttgcagggagaaaactatgccgtcgcgatccttgatatcggcatgcccggcttcgacgggctggaggtggtgcatcgcctgagaaagcgcgggcagacgctgccggtgctgtttcttaccgcccgcagcaacgtggcagacagggtgaaggggctgaatgccggggcggatgactacctgccgaaaccgttcgagctggaggagcttgatgcccgcctgcgcgcgctgctgcgccgcagcgaaggacgaacccaggagcgccagcggctgggagagctggagtacgatgatgaaggcttttttctgctgcgcgatgaacccctttccctcacgccgcgcgaactctctttgctgaaggtgctgatgcaccgccggacccgtcccgtctcccggcaacagcttttcgaccaggtattcagcctgaacgacgacgtcagccccgagagcatcgatctctatattcaccgcctgcgtaagaagctgaccggcagcggggtgcggatcattaccctccgggggctgggctacgtgctggagtgcggcgatgaggtgggttaagccgcagtcgctttacctgcaacttttgctttttctgggtttgccgctgctgctgttatgggggctgtcagcctttaacagctatgttagcgcgttacaggcggcgacgcaggcctatgaccgcacgctgttatcctcggcgcgcacggtgtcagagcggctggtggtgcacaacggcaagctccaggtgaacgtgccctgggtcgtgctggacagtttcgagctgaacatgaacgatcgcctctattacaaggtcgtggaccccgacgggcgggtgatctccggctacgacgatctgccgaatatgcctccctccacgtcgcgcactacacactatccggcgctggcgtggttttatcataccgagtatcgcgggcaggcgatccgtgtggcgaagctgctccagccggttaacgaggacagtgtgttcgggatggcggagatctacgtcgccgaaacgttgcagtcgcggcgctatctggccactcagctgctgttttcctcgctcgtgtcgcaggggctgctggtgctgctgacgctggtcctgaccgcgtggctgctgcgtcgtgtgctgcgcccgatgcggcagctctcgtccctgatggtgcgccgtgagcccgggctgctggctccgctgccggagctgctgccctggtcggaaacgcggctgctgattgtggcatttaaccgctatatcgacaggttgcgcggcgtactttcgcggcaggcgcgctttaacgccgacgcctcacaccagctcaaaacgccgctggcggtgctgaaaacccaggtatcggttgccctgacgcgtaacgatccggcgctgtggcaggagagcttacgggcgatgaacgtcacgctggataacaccatcgtgctgacggaaaggctgttgcagctttcggcggtgaagcgaaaagagcagggggagcgacagtttgcgcctgtcgatctggtacaggtggtgcaaaactgctgcttttcccggctggcgcaggcgcgcagcaagggtatcgatctcggttatgacggcgtacagcagccggtaatgattgagggggatgacgtgttgctgggcgaactttgcgccaacctgctggagaacgcgatcaaatacacaccggagcagggcgtcgtgacggtgtacctgcgcacggctaacgatgccgttgagctgagcgtggaggacagcggaccgggcattgctgaagaccagatctcccaggccatgctgccgtttcatcggctggataacgtgggcgatgccgccgggtccggcattggcctggcgctggctaacgatattgcccgcctgcaccgcagccatcttcagctgatgcccagtgaaaatctgggtgggctgagcgtgaaaatgcgttttctgatgctggtataaatgccgatattatcaaatcgttacaaactaattgcccgccgcacgcggagtccattgatcacacaggcagtcaggttaaaatctcgcggtttttggacatctctgaataaattgtgcgggatcacgacaatgaaaaaagtggcattaatgggcttaagcggcctgatgtttgtttcagcagcggcaaacgcaatttccttcaacggctcggcgggacaagattatacccatctgggctttggtcttggcacggatagcgcaggcctggcaatgaccggcggctggacgcacaacgacgacgatggggatgcggcaagcctgggcctcggcttcaacgtgccgttgggtcccttcctggcgaccgtcggcggtaaaggcatttacaccaacccgaacgacggcgacgaaggctacgcggcggcagtgggcggcggcttgcagtggaaaattggcgacagctttggcctgttcggtgagtactactactccccggattccctctccagcggtatcgacagctatcaggaagctaatgccggcgcgcgctggaccatcatgcgtccgatcaccatcgaagcgggctatcgctatctgaacctggccggtaaagacggcaaccgcgacaacgccctggcagacggtccgtacgtcggcgtgagcgccggtttctaatcctctcggcgcggcgttcagtcgcgccagtttctctcttcccccggtcctcgattgcgctatagtgttttgaccattgaaatgggagaacacaatgataaatgtggaaatgttatccactggcgacgaagtgctgcatgggcaaatcattgataccaatgccgcctggctcgccgatctcttctttgagcaaggattaccgttaacgcgccgcaacaccgtaggtgacaatcttgagtcgctggtcaacgttctgcgcgagcgcagcgaacgctgcgacgtgctgattgtgaacggcgggctgggacccaccagcgacgatctcagcgcgctggccgccgccacggccaaaggcgaaggcctggttctgcacgaggcgtggctggcacagatggagcgctttttctccgggcgtggccgcgtgatggcccccagcaaccgcaagcaggctgaaattcccgccagcgcggaactgattgataacccggtcggcaccgcctgcgggtttgccgttcagctgaaccgctgcctgatgttcttcaccccgggcgtcccgtcggaatttaaagtgatggtcgagcagcagatcctgccgcgcctgcgcgcgcgcttcacgctgcctgaaccgccgctgtgcctgcgtctgaccacctttggtcgctcggaaagcgatctggcccagagcctcgaacaactgcaactgcctcccggcgtgtcgatgggctatcgctcctccatgccgattattgaactgaagctgaccggaccggcgtcagagaaagccgccatgctggcgctgtggccggaagtgcagcgcgtcgccggggaaagcctgattttcgaaggaacggaagggctgccggcgcagatcgcagcgcatttgcagtcccgccagttgagcgtgacgttaagcgagcagtttaccggtgggcttctggcgcttcagcttacccgggcgggtgcgccgctgctggccagtgaagtggtgccgttccagcaggagacgctggcgcagaccgcgcgctgggcgtccgagcgcagagtgaagcatttcgccgggctggcgctgtttgtgggcgggctggatgaggagcacctcaactttgccctggcaacgccggaagggacgcacgccctgcgggtcagaatgagcattacccgccacagcctggccgtgcgtcaggaggtgtgcgcgatgatggcgctgaacatgctgcgccgctggctgaacgggaaagaggtcgccagcgagcacggctggatcaacgtcgtcgaatcgctgttcgtggagtgagagtgtgccggggccgtgtccccggcaacggttacgccagcgcttttgccagcaaggtaatgggatgttcacagcgtttgctggtggacatctcgatctgccacttgcaagtttcgcagtccgtcaccacgatatctgcgccgctctcttcaatctgccggaacagcggcgcgccaatggcctgtgacgttgggtagttttcacgcttgaagccgtacgtgcctgcgatgccgcagcagcgtgagtccagcaccgtcagctccagcccggggatcagccgcagcagctcaagcgtatagatcgaccagcccatcttctccatatgacatggcgtgtgatacaccaccttcagcggcaatttgcccagcggtaacgtctgaccgctgtccagtttgcgccagagaaaacgggtcgccagctcaatgtgctcgcgcaggccggtgttatccacatccagcagatgcggatattcatcgcgcagcgtgaaggtacaggttgaagacgtcgccagtaccggtatccctttgtcgacgatcgcctcgcgtaaagaggtgacgttgctgctcgcctgcttgcgcgctttgtcgatgaagccgttggcaatcagcggaacgccgcagcacttttctttgttcagcagctgaacgcccgttcccatggcgttcaggactttcagcaggtcttttcccagctgcggatggttgtagttcacgtagcagccgtggaagaaggcgacctgctcagtgaactgcgcctgttctgccgccacggatttaaaccagcggcggaaggtgccgtgagaatatttcggcagactgcggtgatggtcgattttgagcgtcgcatccagcagcctgcgcaccggcttcagggcggtggcggcattgacgaccggcgcgaaaggcgtcgagaggctacccatcagatcggtgtggctcagtatcgcgtcacgcagcgtcggtttttgcgtactgtagcgggcgcgggcgcgctggatgatatcgcctattttcacgtccgacgggcaggcaacttcgcagcgtttgcagttgatgcagtatttcagcgcctcgtcgtagagcgcgccatccttcaggcgcagacgctccccgtcgggaccggcctgtttcgggccgggatagcgcggatcgacgccgctgaccgggcaaaccgtggtgcagaccgtgcatttgatacagctttcaaatcgggtgtcgttcattgtgctccctccctgcgctggataatctgctccgcgacatgcagcgcagtgacggcgcagacgccgccaccgcagccctgcgccacgggatcgtacccgcccagaaccgagccgatggcgtaaagattttcaaccggttccccgcccagccgcgggcgcagttggctgtcgacgatcacgccgaactgctgccagggctgcggggtgaagaaatcgctttgataccagtccgcgcgggaagcgctttgccggacgtccagaccgaggatcgcctcacgcacgccatcccggctgctcagcagaccgttactgaagaaactgccgcttgccagcaccgtaaagcgtgcgcgaagcgggatgtcgccgtggttgcgggtccagatttcgcttaccgcgccctcagccagggtgatttttttcacctcgtcgcctgccatccagacgccaccctgggcaacaaactgacgctgaagctgggtgtgcagacgaatgccgggcacggaaggggggagcgtcggcagtaaaccgagcgtacagggcaggcgcgccgagagccagcgccatagccggttgtccgttaagccaaaacaggcgggcataaacagggcgtcgcaggtctcgccgagcggttgaagcgccgcgtacagctgcggccagtaactttcattatccagcaggcgggcaatgttcaccgcacgaaactcgctggggttttcgcgcagcacgtcgagttcggggagatcaatctccgccgtatccacctgaacaccctgctgtctgagagacgcggcggccagatgcggctggaaatcgaggaagccgctgatccccaccacccgcacgcgctcggcagcgatgggggcgacaggcacctcttccgggctaagccaggcggcgcgcagggtgccgagcggcgtgacgcgctgatgattatgctcggcgtcaccctgcatgcgtgcgccgcaggtggtgagcaggtgttcggtttcgcaggcaaagcgggccatattctctgcgcccgtcaggcggtagggatgttcaggcggcagatcggcgaacgatagcgcgcccagtaaatccagcgagccggaagagaagtgcagggcactctgaccgcgagtgacaatggcgcagcgcagaccccgctgcgtcagtttgaggccgcacagcaggcccgccagtcccccacccacaatcacggtatcaaatttcatggttgtgctccttctccagaccgcaaagcccctgatagacccagcgggtaaactcgctttcgcgcagggcatcgccccaggcgacgggctgaatgcctttccagcgctcgtttaaaaaatcgctgagctgggcaagcgactgggttgacgtggtggcgtgaaaacgttgcagcagcccggcggcacggcaggcgcacagctccccctgacaggtgcccatcccgacgcgcgtgcggcggcgtaaatcgagcaggttgttcaccgtcagattttccacggcatactgcacctcgcctgcggtcacggcttcgcattcgcacaccaggctgcggctgagtcgcccttcaccgagccaggttggggtgcggtcgccgtggcggtaaatcgctgaaccgcgaagcggggcagggagtgaaatgatcttgtgcagcgttttttctgtcgattgctgcgagccgggcagagcctgttccgccgtcacgcacggtgcggtgttgccgagcttacggcagacggcatcggtggcccactgggccatcagccggtaggtcatcagcttgccgccggtaatggtgataaacccgtccatgccgtcgcgttcggcgtgatcgagcagcacgatgccgcggctgacgttacgcccgctcggatcgttatcgctggcgacgaggggacgcacgcccgcgtaggcacgcagaatacgcgtctgcgccatcaccggggccagcttttccccttcgcgcagcaggatatccacctcttcagcggtgacgcggttgtaatcaatttcgctgtagtccacatgcattgaggtcgtgccgattaacgaaatggtgtcccccggcacgaggatatcggcgtcagacggtttacggcagcggttgatgacatggttattgatgcggtggtcgaggatcagcagcgagcctttcgccgggaacatgcgcaccgacaggtccgcgtattccgcgatgcgctggccccagatccccgccgcgttgaccacgacggcggcatacagctcgcggtgttcgttgtactgcgcatcaaacacgcgcaccccgcgcacggtattaccttcacgaataagcccggtgacgtgatgcccggtcaggatctgggcgccatgttcccgcgcgtcgagcatattggcggcggtcaggcggaaaggatcaacggttccgtccggtacttttaccgcgcccagtaacgccgggtttaccgagggttcaagacggcgcgcctgcgcaggatcgatcgcctcggcctgaatgcctgccgccgtgcaggcggtgataaaggtttgctgaaagccgaggtcatcttctggaagggtgataaaaagaccgttggtcggttcaacgcagtggcgggcgatgcgcctgaggatctggttttcagcgatacactcgcgcgctgactcagcgtcagtgaccgcatagcgggcgccgctgtgcaacagaccgtggttacgtcccgtcgcgccggtggcgatatcgtggcgttccagaagcgtgacgctcaatccccgcagggcgcagtcgcgtgcgatgccggcacccgtcgcgccaccgccaatgataatcacatcgctgaagcgtggatcgtgaattgtcattgcctttcctctatgttcgttttttagcatttagccacattgatcgtgtggtttgtttgatttcgaacataaacgcgcgaaattcgaaagtgaaacgtgatttcatgcgcttttttgcgcattctgtcatatttctgtaacaatctgtgcgttgattcacagtaacattcaccgtgatttcttaacatcgccgcctctgtagccgggcgcgagatgcccggtcattttttgaaaggccacggaggctgttatgctcagtatctttaaacctgcgccacatcgggcgcgactgccagaggcagagattgatcctctctaccgccgtctgcgttggcaaatcttcctcgggatcttcttcgggtatgcggcgtactatctggtacgtaaaaactttgcgctcgccatgccgtacctggtggagcagggcttctctcgcggcgatctgggatttgcgctgtcggggatctccatcgcgtacggtttttcgaagttcattatggggtcggtgtcggatcgttcgaatccgcgcgtgttcctgcccgccggtctgatcctcgcggcagcggtgatgctgttcatgggctttgtgccgtgggcgacctccagcattgccatcatgttcgtgctgctgttcctctgcggctggttccaggggatgggatggccgccatgcggacgcaccatggttcactggtggtcacagaaagagcgtggtggaattgtttcggtctggaactgtgcgcataacgtcgggggcgggcttccgccgctgctgttcctgctggggatggcctggttcaacgactggcatgccgcgctctatatgccagcctttggcgccattctggtggcgattatcgccttcgctctgatgcgcgacaccccacagtcctgcggcctgccgccgattgaagagtacaaaaacgactacccggatgattacagcgagaagcacgaagaagagctgacggcaaagcagatcttcatgaagtacgtgctgccgaacaagctgctgtggtacatcgcggtggcaaacgtatttgtctacctgctgcgctacggcatcctcgactggtcgccaacctacctgaaagaggtgaagcacttcgcgctggataaatcctcctgggcctatttcctgtatgaatacgcgggcattcccggcacgctgatctgtggctggatgtcggacaaagtgtttaagggcaaccgtggggcgacgggcgtgttctttatgacgctggtcaccatcgcgacggtcgtttactggcttaacccgccggggaatccgggtgtggatatggcctgtatgatcgtcatcggcttcctgatttatggtccggttatgctgattggtctgcatgccctggagctggcgccgaagaaagcggcaggcacggcggcaggctttaccggtctgtttggctacctcggcggttcggtcgctgcgagcgccatcgtcggctacaccgtcgacttcttcggctgggatggcggctttatggtgatgattggcggcagcgtgctggctgttctgctgctggttgttgtgatgattggtgaaaaacgtcaccacgccgaagtgctggcgcgtcgtcaataaggagcattgcgatgaaattaactcagttagcgacaggtctgctgctggcgggcctgatgacaggctccgcgctggcggcggataagatcgtgatcgcccaccgtggcgccagcggttatctgccggagcatacgctgccggcaaaagcgatggcctatgcccagggcgcggattatctggagcaggatctggtgatgacgaaggacgaccagctggtcgttctgcatgaccactatcttgaccgcgtgacggacgtggcggagcgtttcccggatcgcgcccgtaaagatggtcgctactacgccatcgacttcacgctggcggagatccgctcgctgaagtttaccgagggcttcgagattgaaaacggtaagaaggtacaggtctatccgggacgtttcccgatgggcaagtctgacttccgtattcacaccttcgaagaggagatcgagtttgtacaggggctgaaccactcgacaggaaaaaatatcggtatctacccggaaatcaaagcgccgtggttccaccatcaggaagggaaggacattgccgccaggacgctggaggtactgaaaaagtacggctacaccagcaagcaggataaggtcttcctgcaatgtttcgatgcggcggaactgaagcgcatcaaaaccgagctggagccgaagatggggatggatctcaatctggtgcagctgattgcgtataccgactggaatgaaacccaggaaaaacagccggacgggaagtgggtgaactacagctacgactggatgtttaagccgggcgcgatgaagcagattgcgcagtacgccgacggcatcgggccggattaccacatgctggtggcggaaggctcaacgccgggtcacgtgaagctgacggcgatggtgaaagaggcgcatgcgagcaagatgcaggtgcatccgtataccgttcgtgcagaccagctgccggagtatgcgacggacgtgaatcagctttacgaggtgctgtataaccaggcggatgtggacgggttgtttacggatttcccggataaagcggtcgaattcattcaccggaaataggtttggtaggtcgggtaaggcgaagccgccacccgacaatcaggctctgcgnnnnnnnnnnnnnnnnnnnnnnnnnnnnnnnnnnnnnnnnnnnnnnnnnnnnnnnnnnnnnnnnnnnnnnnnnnnnnnnnnnnnnnnnnnnnnnnnnnnnnnnnnnnnnnnnnnnnnnnnnnnnnnnnnnnnnnnnnnnnnnnnnnnnnnnnnnnnnnnnnnnnnnnnnnnnnnnnnnnnnnnnnnnnnnnnnnnnnnnnnnnnnnnnnnnnnnnnnnnnnnnnnnnnnnnnnnnnnnnnnnnnnnnnnnnnnnnnnnnnnnnnnnnnnnnnnnnnnnnnnnnnnnnnnnnnnnnnnnnnnnnnnnnnnnnnnnnnnnnnnnnnnnnnnnnnnnnnnnnnnnnnnnnnnnnnnnnnnnnnnnnnnnnnnnnnnnnnnnnnnnnnnnnnnnnnnnnnnnnnnnnnnnnnnnnnnnnnnnnnnnnnnnnnnnnnnnnnnnnnnnnnnnnnnnnnnnnnnnnnnnnnnnnnnnnnnnnnnnnnnnnnnnnnnnnnnnnnnnnnnnnnnnnnnnnnnnnnnnnnnnnnnnnnnnnnnnnnnnnnnnnnnnnnnnnnnnnnnnnnnnnnnnnnnnngcccggcagcagcagggcaaaatctccccttcactgataaaggccagcggttcggtcagccagtctacctggcctgcgaccagacggcagcggcaggagccgcagtagccttcacgacactggtactctacttcaacctgatgcgcttcaagcgccaccagcagagaagggtgctcttcctggcacagcacctctgtaccagaaaggctcagcgttacgcggctcatcagagctggaaatcgctcaggtcgtcggtgttgacttcagaatcaatttgaccgaccagataagaactcacttccacttcctgcggcgcaacctgcacgttatcggacaccagccaggtgttgatccacggaatcgggttagagcgcgtctggaatggcagatcgagacccacagcctgcatgcggatattagtgatgtactccacgtactggcacagaatgtctttgttcaggccaatcatggagccgtcgcggaacaggtagtctgcccactctttctcctgctgggcggcctgaacgaacaggtcgtagcactcctgtttgcactcttcggcaatcgcagccatttccgggtcgtccgcgccgctgcgcagcaggttcagcatatgctgggtgccggtcaggtgcagggcttcgtcacgggcgatcagacggataattttggcgttaccttccatcagcttgcgctcggcaaaagcgaaggagcaggcgaagcttacgtagaagcggattgcttccagcgcgttgacgctcatcaggcacaggtacagctgttttttcagggtccgcaggttgacggtaacggttttaccgttcacgttgtgcgtgccttcgcccagcagatgccagtagctggtcatctcgatcagctcatcgtagtagtgcgcaatgccttccgcgcgcttctggatctgctcgttggtgacgatatcgtcaaacaccaccgccggatcgttcacgatgttgcggatgatgtgggtgtaagagcgggagtggatcgtctcggagaacgcccaggtttccacccaggtttccagctcaggaatcgagatcagcggcagcagcgccacgttcggactacggccctgaatggagtccagcagcgtctggtacttcaggttgctgaggaagatgtgcttttcgtgttccggcagcgcctggaaatcgatacggtcgcgggaaacgtcaacttcttccggacgccagaagaaggagagttgcttttcaatcagcttttcgaagatgtcatatttttgctgatcgtagcgtgccacgttgaccggctggccgaagaacatcggctctttgagctggtcgtttttcgtctgtgaaaaggtggtatatgccattgcggtgagtcctgttgagattttattgcccggcggcactgcgtttgccgggcctacaaaaccgtaggccgggtaagcgtagcgccacccggcgaagtgcttagatcttacatgcgccgctttcgcagccatcgtcctgaattgacggcaccaggtcgtcctgggcgtcttccgcaccatcacgggtgttgtgatagtacagcgttttcacgccaaatttgtaggcggtgagcaggtctttcagcagttgctgcatcggaaccttgccagacgggaagcgcgttgggtcgtagttggtattggcagagatcgactggtcgataaacttctgcatgatacccaccagttgcagatagccgtcgttgtttggcatttcccacagcagctcgtagttgtcacccagcgtttcgtaatccggcaccacctgacgcagcacgccgtctttcgacgctttgatgctgacgtggccgcgcggtggctcaataccgttggtggcgttggagatctgcgaagaggtctcggacggcatcagggcagagagcgtggagttacgcaggccgtgagttttaatggactcgcgcaggccttcccagtcgaggtgcagcggctcgctgacgatcgcatccaggtcttttttgtaggtgtcgatcggcagaatgcctttcgcgtaggtggtttcgttgaaccacggacacgcgccttgctctttcgccagctcgttagaggctttcatcaggtagtattggatcgcttcgaacgtctggtgcgtcagattgttggcgctgccgtcggagtaacgcttgccgtttttcgccagccagtaggcgaagttgatcacgccgatacctaaagtgcgacggcccattgcgccgcgttttgccgccgggattgggtaatcctggtaatccagcagggcgtcgagcgcacgaaccgccagcaccgccagctcttccagctcgtccaggctcttaatcgcacccaggttgaacgcggacagcgtacagagcgcgatttcaccgttttcgtcgttcacgtcttnnnnnnnnnnnnnnnnnnnnnnnnnnnnnnnnnnnnnnnnnnnnnnnnnnnnnnnnnnnnnnnnnnnnnnnnnnnnnnnnnnnnnnnnnnnnnnnnnnnnnnnnnnnnnnnnnnnnnnnnnnnnnnnnnnnnnnnnnnnnnnnnnnnnnnnnnnnnnnnnnnnnnnnnnnnnnnnnnnnnnnnnnnnnnnnnnnnnnnnnnnnnnnnnnnnnnnnnnnnnnnnnnnnnnnnnnnnnnnnnnnnnnnnnnnnnnnnnnnnnnnnnnnnnnnnnnnnnnnnnnnnnnnnnnnnnnnnnnnnnnnnnnnnnnnnnnnnnnnnnnnnnnnnnnnnnnnnnnnnnnnnnnnnnnnnnnnnnnnnnnnnnnnnnnnnnnnnnnnnnnnnnnnnnnnnnnnnnnnnnnnnnnnnnnnnnnnnnnnnnnnnnnnnnnnnnnnnnnnnnnnnnnnnnnnnnnnnnnnnnnnnnnnnnnnnnnnnnnnnnnnnnnnnnnnnnnnnnnnnnnnnnnnnnnnnnnnnnnnnnnnnnnnnnnnnnnnnnnnnnnnnnnnnnnnnnnnnnnnnnnnnnnnnnnnnnnnnnnnnnnnnnnnnnnnnnnnnnnnnnnnnnnnnnnnnnnnnnnnnnnnnnnnnnnnnnnnnnnnnnnnnnnnnnnnnnnnnnnnnnnnnnnnnnnnnnnnnnnnnnnnnnnnnnnnnnnnnnnnnnnnnnnnnnnnnnnnnnnnnnnnnnnnnnnnnnnnnnnnnnnnnnnnnnnnnnnnnnnnnnnnnnnnnnnnnnnnnnnnnnnnnnnnnnnnnnnnnnnnnnnnnnnnnnnnnnnnnnnnnnnnnnnnnnnnnnnnnnnnnnnnnnnnnnnnnnnnnnnnnnnnnnnnnnnnnnnnnnnnnnnnnnnnnnnnnnnnnnnnnnnnnnnnnnnnnnnnnnnnnnnnnnnnnnnnnnnnnnnnnnnnnnnnnnnnnnnnnnnnnnnnnnnnnnnnnnnnnnnnnnnnnnnnnnnnnnnnnnnnnnnnnnnnnnnnnnnnnnnnnnnnnnnnnnnnnnnnnnnnnnnnnnnnnnnnnnnnnnnnnnnnnnnnnnnnnnnnnnnnnnnnnnnnnnnnnnnnnnnnnnnnnnnnnnnnnnnnnnnnnnnnnnnnnnnnnnnnnnnnnnnnnnnnnnnnnnnnnnnnnnnnnnnnnnnnnnnnnnnnnnnnnnnnnnnnnnnnnnnnnnnnnnnnnnnnnnnnnnnnnnnnnnnnnnnnnnnnnnnnnnnnnnnnnnnnnnnnnnnnnnnnnnnnnnnnnnnnnnnnnnnnnnnnnnnnnnnnnnnnnnnnnnnnnnnnnnnnnnnnnnnnnnnnnnnnnnnnnnnnnnnnnnnnnnnnnnnnnnnnnnnnnnnnnnnnnnnnnnnnnnnnnnnnnnnnnnnnnnnnnnnnnnnnnnnnnnnnnnnnnnnnnnnnnnnnnnnnnnnnnnnnnnnnnnnnnnnnnnnnnnnnnnnnnnnnnnnnnnnnnnnnnnnnnnnnnnnnnnnnnnnnnnnnnnnnnnnnnnnnnnnnnnnnnnnnnnnnnnnnnnnnnnnnnnnnnnntactttccgccaggatgccgccgccgcagccgacgtcgagcactttcttaccgaacagaccgccggaacgctccgcgatatagcccagacgcagcgggttaatacgatgcagaggtttgaactcaccttcgagatcccaccagcgggacgccaccgcttcaaatttggcaatctcttcgtggtcaacgttgtgagccaccggggatttttcggcattcatgggcgcttttactccttatttagcaagacaaatgagtatatcaggcaatccctgtgaataaagcgtataggtttacctgtatcaccgcggctgtgttataatttgcgacctttgaatccgggatacagtagagggatagcggttagatgagcgaccttgcgagagaaattacaccggttaacatcgaggaagagctgaaaagctcctatctggactatgcgatgtcggtcattgttggccgtgcgctgccggacgtccgcgatggcctgaagccggtacaccgtcgcgtactatacgccatgaacgtattgggcaatgactggaataaagcctacaaaaaatctgcccgtgtcgttggtgacgtaatcggtaaataccatcctcatggtgattccgcggtgtacgacaccattgtccgtatggcgcagcccttctcgctgcgttacatgctggtagatggtcagggtaactttggttctatcgacggcgactccgccgcggcaatgcgttatacggaaatccgtctggcgaagattgcccatgagctgatggctgacctggaaaaagagacggttgatttcgttgataactacgacggcacggaaaaaattcctgacgttatgccaacgaagatcccaaacctgctggtgaacggttcgtccggtatcgccgtcggtatggcaaccaacattccaccgcacaatatcacggaagtgatcaacggctgcctggcctacattgacgatgaagacatcagcattgaagggctgatggaacacatcccgggcccggacttcccgacggcggcaatcatcaatggccgtcgcggtattgaagaagcgtaccgcaccggtcgcggcaagatttacatccgtgcccgcgccgaagtggaagcggacgctaaaaccggccgtgaaaccattattgttcacgagatcccgtatcaggtgaacaaagcgcgactgattgaaaaaatcgccgagctggtaaaagaaaaacgcgttgaaggcatcagcgcgctgcgtgacgagtctgataaagacggtatgcgcatcgtgattgaaatcaagcgcgacgcggtgggtgaagttgtgctgaacaacctttactcccagactcagcttcaggtctccttcggtatcaacatggttgcgctgcaccatggccagccgaagatcatgaacctgaaagagatcctgagcgcgttcgtgcgtcaccgccgtgaagtggtgacccgtcgtaccatcttcgaactgcgcaaagcgcgcgaccgtgcccatatccttgaagcactggccgttgcgctggcgaacatcgacccgatcatcgagctgatccgccgtgcgccgacgccggcagaagcgaaggcgtcgctggttgcgcgtccatgggatctgggcaacgtggcggcaatgctggaacgtgccggtgatgacgctgcgcgtcctgagtggctggaaccggaattcggcgtgcgtgacggtcagtactacctgactgaacagcaggcccaggcgattctggatctgcgtttgcagaaactgaccggccttgagcatgaaaaactgctcgacgagtacaaagagctgctggagcagattgccgagctgctgcatatcctgggtagcgcagagcgcctgatggaagtgatccgtgaagagctggagctggttcgcgatcagttcggcgacgagcgtcgcaccgaaatcacagccaatagctctgatatcaacattgaagatctgatcaaccgcgaagacgtggtagtgacgctgtctcaccagggctacgtgaagtatcagccgttgaccgactacgaagcacagcgtcgtggcggtaaaggcaaatctgcggcgcgtattaaagaagaagacttcattgaccgtctgctggtggccaacacccacgacacgatcctctgcttctccagccggggccgtctgtactggatgaaagtctatcagctgccggaagcgagccgtggcgcgcggggtcgtcctatcgtcaacctgctgccgctggaagcgaacgaacgtatcaccgctattctgccggtacgcgagtacgaagagggcgtgaacgtctttatggcgaccgcgagcggtaccgtgaagaaaaccgcgctgaccgagttcagccgtccacgttctgccgggatcatcgcggtgaacctgaacgaaggcgatgagctgatcggcgtggatctgacctccggttctgatgaagtcatgctgttctctgccgccggtaaagtggtgcgctttaaagagaacgccgtgcgcgcaatgggtcgtacggcgaccggcgtgcgtggtatcaagctggcgggtgaagacagcgtggtttccctgatcgttcctcgtggcgaaggcgcaatcctgaccgtcacccagaacggctacggtaaacgtacggcggaaagcgaatacccgaccaagtctcgcggcacgcagggcgttatctccatcaaagtgaccgagcgcaacggttccgttgttggcgcggtgcaggtggacgacgcggaccagatcatgatgatcaccgatgccggtacgctggtgcgtacccgcgtgtctgagatcagcgtggtaggccgtaacacccagggcgttatcctcatccgcactgcggaagatgaaaacgtcgtcggtctgcaacgcgttgctgagccggtggatgacgaagagctcgactctatcgacggcagcgtcgcggaaggggatgatgaaatcgccccggaagcggacaccgatgatgaagcagcggatgacgctgacgagtaacgtctcctgacgcataaagggccggtttccggcccttttgttttgcgcaagcagacaagtgaacgttgcgacaagccgcgtttaccgctaccttaaccacattctttttgaccccgacggcggagcctcgcccctttgaaatacctcgtctcctttcgtaccacgttaaaagtctctcgctatctgtttcgggcgcttgcgctactgctatggttgctggtggcactgctctcggtgttttacattgttaacgcgttacaccagaaagaagcggagatccgccaggagtttaacttaagctcggatcaggctcagcgctatatccagcgcacgtctgacgtgatgaaagagcttaagtatattgctgagaatcgactcacggcggagaacggcattcttgctatccgcggtcgggatgaaaaaaccgaagtacctgatttcgaaccgctcttcccggactccgattgttccgccatgggcaaagcctggcgtggttcactggagtccctgtcatggtttatgcgctactggcgcgataacttctcggccgcctacgacctgaaccgcgtctacctgattggcaacgaaaatctctgcatggcggatttcggcctgcgggatatgcccgtcgaacgcgaagacgcgctgaaaagtctgcatgagcgtatagtgaaataccgcaatgcgcctcaggaagagcgcgggaacaacatcttctggataagccaggggccgcgcatgggcgtcggctatttctatgccctgactccggtttacctcggaaaccgcctgcaagcgctgctggggattgaacaaaccatccgcatggaaaacttcttcannnnnnnnnnnnnnnnnnnnnnnnnnnnnnnnnnnnnnnnnnnnnnnnnnnnnnnnnnnnnnnnnnnnnnnnnnnnnnnnnnnnnnnnnnnnnnnnnnnnnnnnnnnnnnnnnnnnnnnnnnnnnnnnnnnnnnnnnnnnnnnnnnnnnnnnnnnnnnnnnnnnnnnnnnnnnnnnnnnnnnnnnnnnnnnnnnnnnnnnnnnnnnnnnnnnnnnnnnnnnnnnnnnnnnnnnnnnnnnnnnnnnnnnnnnnnnnnnnnnnnnnnnnnnnnnnnnnnnnnnnnnnnnnnnnnnnnnnnnnnnnnnnnnnnnnnnnnnnnnnnnnnnnnnnnnnnnnnnnnnnnnnnnnnnnnnnnnnnnnnnnnnnnnnnnnnnnnnnnnnnnnnnnnnnnnnnnnnnnnnnnnnnnnnnnnnnnnnnnnnnnnnnnnnnnnnnnnnnnnnnnnnnnnnnnnnnnnnnnnnnnnnnnnnnnnnnnnnnnnnnnnnnnnnnnnnnnnnnnnnnnnnnnnnnnnnnnnnnnnnnnnnnnnnnnnnnnnnnnnnnnnnnnnnnnnnnnnnnnnnnnnnnnnnnnnnnnnnnnnnnnnnnnnnnnnnnnnnnnnnnnnnnnnnnnnnnnnnnnnnnnnnnnnnnnnnnnnnnnnnnnnnnnnnnnnnnnnnnnnnnnnnnnnnnnnnnnnnnnnnnnnnnnnnnnnnnnnnnnnnnnnnnnnnnnnnnnnnnnnnnnnnnnnnnnnnnnnnnnnnnnnnnnnnnnnnnnnnnnnnnnnnnnnnnnnnnnnnnnnnnnnnnnnnnnnnnnnnnnnnnnnnnnnnnnnnnnnnnnnnnnnnnnnnnnnnnnnnnnnnnnnnnnnnnnnnnnnnnnnnnnnnnnnnnnnnnnnnnnnnnnnnnnnnnnnnnnnnnnnnnnnnnnnnnnnnnnnnnnnnnnnnnnnnnnnnnnnnnnnnnnnnnnnnnnnnnnnnnnnnnnnnnnnnnnnnnnnnnnnnnnnnnnnnnnnnnnnnnnnnnnnnnnnnnnnnnnnnnnnnnnnnnnnnnnnnnnnnnnnnnnnnnnnnnnnnnnnnnnnnnnnnnnnnnnnnnnnnnnnnnnnnnnnnnnnnnnnnnnnnnnnnnnnnnnnnnnnnnnnnnnnnnnnnnnnnnnnnnnnnnnnnnnnnnnnnnnnnnnnnnnnnnnnnnnnnnnnnnnnnnnnnnnnnnnnnnnnnnnnnnnnnnnnnnnnnnnnnnnnnnnnnnnnnnnnnnnnnnnnnnnnnnnnnnnnnnnnnnnnnnnnnnnnnnnnnnnnnnnnnnnnnnnnnnnnnnnnnnnnnnnnnnnnnnnnnnnnnnnnnnnnnnnnnnnnnnnnnnnnnnnnnnnnnnnnnnnnnnnnnnnnnnnnnnnnnnnnnnnnnnnnnnnnnnnnnnnnnnnnnnnnnnnnnnnnnnnnnnnnnnnnnnnnnnnnnnnnnnnnnnnnnnnnnnnnnnnnnnnnnnnnnnnnnnnnnnnnnnnnnnnnnnnnnnnnnnnnnnnnnnnnnnnnnnnnnnnnnnnnnnngattctggtcgtcgacgatcatccgattaaccgtcgtctgctcgcagatcagcttggctctctgggctatcagtgtaaaacggccaatgatggcgtggatgccctgaatgtcttaagtaagaaccatattgatattgtgctcagcgatgtaaatatgcctaacatggacggctaccgtctgacgcagcgtatccgacagctggggctgacgctgccggtggtgggggtgacagccaacgcgctggcggaggagaagcagcgctgtctggaatcgggaatggacagctgcctgtcgaagccggtcacgctggatgtactgaagcagacactgtccgtgtatgcggagcgggtacgaaaagcgagacaataaaaaaggcccgaaagggccttttttatgtacccggcggcgcggcgcttgcgcgggcctacggggtctgtaggccgggtaagcgcgagcgccacccggcgtagacagcgaagatcaatctttgtccgttgcgctcagcgtcacggaagagagatagttcagcagggcgatatcgttatccacacccagcttcatcatcgcggattttttctggctactgatggttttaatactgcggttcagcttcttggcgatttcagtgaccaggaaaccttcagcgaacagacgcagtacttcactctctttaggcgagagacgcttgtcgccatagccacccgcactgattttttcaagcaggcgtgagacgctctcaggagtgaattttttccctttctgtagcgccgccaacgcttttggcagatcggtaggtgcgccttgtttcagcacaatcccttcaatatcgagatccagaacggcgctcaggatcgccgggttattgttcatggtcagaacaatgatcgaaatgtccgggaagtggcgtttaatgtatttgatgagcgtgatcccatcaccgtacttatctccaggcatggagagatcggtaatgagcacgtgcgcatcaagtttaggcaggttgttaatgagggctgtggaatcttcaaattcaccgactacattcacccactcgatctgttcaagtgatttgcgaataccgaacagtacaatcggatggtcatcggcaataattacgttcatattgttcatgtataaggctaccttgctacagcaagctcttgacgtaagcgtcaatgtcgctgatgtatttttcaatgccagaggcatctttctcacgaattagatgttccagcgtttcacataactgcttgccgggaaccagattaagcatggcaaacacccctttaagccggtgtgctgtctgtgccagcgctgcaaaatcctgcgcagcggactcagtatacaaccgcttaacatcatctggtactgtatcaacgaagagcgaataatatccgctggcatggagttcggcattttcatcgccgcctaacggtgactccaggatctcttcctgcgccagattctcttcaatcagttgtaatacagcttcctgcattgcattgctcatattaaagttgacgcgcagctgcccagggccgattttccgcacgcctggctcatcatcgcttaaaagcaagcctgaggcagtaagattagacggattatcagttaaaaatagatcaaattcttgactcgcgagcctttcgtccggggtaatgcaggacgccccccagttttccagctgacgaacgacgatattacggatctcactggaggtcacatccaccatcaccaccacatcgtccagcagacgctcttcatcctcttcctggggattcgccgccattttcacgtgtaaagagtagcgggtgccgagggattcgcgcgccttgatgttcagatgaccgcccagcttacgcgccagctgatcgcaaagccagaaggtgagggcattcgccttgccgtagtggtcgcgctgggtatcgttcaggaacgggaagtgcaggttatcaatttcgctcactgtgacgccttcgcccgtatccagaatgcggaacgtcagacgatcgtcggtggactcatcggtgctgacttcaagggtgatcttgccgatctgcgtcgtggtgacggcatactgtatcaacatcatcaggatgcgacgcagggcatcgcgatcgccgtgacgttcgtcgttggccggtaaatagttgttgatcagcagctggagtcccttgcgcttgatcaccggcaggacttccggcaccacctcatcaatcaggtcctggatggagaagagcgtaggggtgcccttccagatgtcattctccagcatgttcgcaagctggatttcgtccaccagacgaaccagggagtcggcctggctgctgagctgtcggctttccggcgtgctcagatcagcaatctgcgtggcgagtgacttcaacggttgtttaaaggcatcgccaatattttgcataaacgccgcgcggccatgttggtttttctcgtacagcctttgcgcctgcttgagctttttattcaccagcacttcgcgatcctgatcgcgaatgatgaagatttgcgtgcgcgaggcgacctgactgcggaactgacggatctcatacagttcattattaacggtggcctgaataacgccctggtgctggtccgccatggccgtaatattttgcaggttaagatgcggcagaaggtgatcggcaattttattgctcattaccgtgcggttagcctcctggtcgtgaacgagcaccccaagcggcagcacggaaataatctcttcattcagggcacgaagaatgcgcaactcgttgctggtcccggctgataccgacgtcgagtcgctctggcggcccgactggaaacggaaggtgctgtagccaaacagcgccagcgccagcaggccaatattcagcaacagcggcagcagaatgttttgcagagtatcaagcatcagggtgccaaaaggcacctgccacaccagacgcataccggttgagttgagcgatgaggcaatctcaatctttgagccattaaaggagatcgctacgctgtccgcgccttctttatccgacggcgtgcgcatattttgggtgctgttgtctggctccagacggaaactgtccagcggcatatccggtgggatgagatcgttaatcggcaggtcgaaggcaaccacggtcgccagatggcccggctggttaaaggtggttcgcagcgtaaagtagtggccattctgccaggcaagacggcgtaatgacgagaaactttctcgctcgtccagcgcgttggcctgttgcagcatttctgcccgacgggaatccacaatactgccaacggtggtctctttaaagccggacgagagatccttaagcggcagggtcgagatcaggatcatgctgttgtcctgaccgttcaggtaatacattgaccacggtacggtctcggcgccccacagggtgtccagatacgaggagatccgctgcgtcatctcaagcgttgcgctgtcgtgcgagccgaaaatcagggcttccgtcttgcgctgcggtttttcaaggtaatacacatcctgcttaaggcgcgtttcctgcaacccttcgcctgacgaggtggcaggcgcggcagcgatattgtcgtagatttgccaggtcgcatagcgccacgtatcaatgcgcttgtgcaccgcatgggtgatatcgacgatttgatagcttttatctttaagccaggtattaacggcgctctgaaccatcacccccattgtgactaacagcacaacgatcaacagaagaaagaaacgggtgatgctgcccggtagaagggagaatttgctcggggcggtagtttcagtctgactcatcgatgtgtttaacccgtaatggccgcgcggtaatgggatagggcagtataaagggtaataactgaatttccagcgtcgttaacggtatgaccttgactttttatccgggtaaccggcttcaacgtccccggatgaaaggtgtacaaaaccccgtgaaatgtataaatacgcgatcgcacaggcaggaaaatagcacgaataaacaagaaattaatttcaatagcataaaaaagaattcagcgaaagccggatgctggatttagttaatagtcgttatcatttctgaggggtagcacataaaatgtaggctgacgtaaagaaaggtaaaaaaaaaccgaatgcgaagcatccggttcaattagggataaacagacattcagaactgaatgacggtaataaataaagttaatgatgatagcgagagttattttagtggtgttgaagggaatttttttgtcattcagtgctgtaccgttttttaagctaatcacttgtattaaatagaatatatttttgttttgattatccgtgctatatttttaaactatttatgctctgtaaaagttccttcaaatttacaaattgaaacatgttgatggtaaagtgaaacatcttcaaagttttcgtatcatattcctgttggattattctgcatttttgaggagaatgaacttgccgactggttaagagggttgaccagtaagcagtggtaaataataaggcatataacagagggttaataaaatgaaagttaaagtactgtccctcctggtaccagctctgctggtggcaggcgcagcaaatgcggctgaaatttataacaaagacggcaacaaattagatctgtacggtaaagtggatggtctgcactatttctctgatgacgacagtgcagacggcgaccagacctacatgcgtctgggcttcaaaggcgaaactcaggttaacgaccagctgaccggttacggccagtgggaataccagatccagggtaactctggtgagaacgaaaacaactcatggacgcgtgtggcgttcgcaggtctgaaattcgcggatgcgggttcattcgactacggtcgtaactacggcgttgtttacgatgtgacttcctggaccgacgttctgccggaattcggcggcgatacctacggttctgacaacttcatgcagcagcgtggtaacggcttcgcgacctaccgtaaccaggacttcttcggtctggttgatggtctgaacttcgcgttgcagtaccagggtaaaaacggcagcccaagcggcgaaggccagaccaacaacggtcgtgaggcactgcgtcagaacggtgatggctacggtggctctctgacctacgatctgggcgaaggcttcgcactcggtacggcggtcaccagctctaaacgtactgatgaccagaacgccatggcctacggtaacggcgatcgcgcagagnnnnnnnnnnnnnnnnnnnnnnnnnnnnnnnnnnnnnnnnnnnnnnnnnnnnnnnnnnnnnnnnnnnnnnnnnnnnnnnnnnnnnnnnnnnnnnnnnnnnnnnnnnnnnnnnnnnnnnnnnnnnnnnnnnnnnnnnnnnnnnnnnnnnnnnnnnnnnnnnnnnnnnnnnnnnnnnnnnnnnnnnnnnnnnnnnnnnnnnnnnnnnnnnnnnnnnnnnnnnnnnnnnnnnnnnnnnnnnnnnnnnnnnnnnnnnnnnnnnnnnnnnnnnnnnnnnnnnnnnnnnnnnnnnnnnnnnnnnnnnnnnnnnnnnnnnnnnnnnnnnnnnnnnnnnnnntctgaaatacgacgcgaacaacatctacctggctgcacagtatactcagacttacaacgcgacccgtgcgggcgacctgggctgggctaacaaagcgcaaaacttcgaagtggttgcgcagtatcagttcgacttcggtctgcgtccatccgtggcgtacctgcaatctaaaggtaaggacctggaaaacggctacggcgaccaggatctgctgaaatatgttgatgttggcgcgacttactacttcaacaaaaacatgtccacctacgttgattacaaaatcaacctggttgatgagaacgacttcactcgcgcagcaggtatcggtactgacgatatcgtcgcgctgggtctggtttaccagttctaattgctcatacagcgacaaaggggccatcaggccccttttttcatgcttttttagggtcttacaaatacgctgttttagtgtactcttgccgccctggcatgaggataataaccaatggatatgacttttttacgcgccagcgttctggcgacttttttactcctgaccgcgtgtgactcttccacacagcccgcaaaaatcgacgcacccgccgcgacggtgctggaagggaaaaccatggggaccttctggcgcgtcagcgtgatggatattgataaatcccgcgctgaagaattacgcggtaaaattcaggcgcagctggatgccgacgatcagctactctctacctataaaaatgactcagcgctgatgcgtttcaatcgctccagcagcacctcgctgtggccggtgagcgaagcgatggccgatatcgtcacggaatccatgcgcgtgggctacaaaaccaatggcgcaatggatgtgaccgtggggccgctggtgaacctgtggggatttggccccaacaagcagccggtgactacacccgatcaagccgccatcgacgacgcccgcgcccgtacagggttacagcatctggcggtgatctcccagtacggtcagcaatacctgcaaaaagatattcccgacctgtttgtcgatctctccacggtaggcgaggggtatgctgcggatcatctcgcggccctgatggcgcaggaaggcattccccgttatctggtttccgtcgggggcgcgctcgtcagccggggcatgaacgccagcggcaggccgtggcgagtggccatccaaaaaccaaccgatcagcagaacgcggtgcaggcgattgtcgacatcaacgggcacggtataagcacctccggaagctaccgcaactattacgagctggatggcaaacgtatctcgcacgtgattgatccgcaaaccggacgcccgattacccacaacctggtgtccgtgacggtgatagccccaaccgcgctggaagcggatgcctgggataccggattgatggtgctcggcacggagaaggccaaagaggtggtgcgtcaggaagggctggccgtctatatgatcaccaaagaggctgacggatttaaaacctggagttcgccgcagttcaacagcttcctggtgagcgaaaaaaattaaaaagcaaggttgcgggtttttgttcggtggcgttcaggcaagctgagcgtatgcttgtaagaggagccgataatgaaaaacacaacctatcttaccgatgaggatcgctggcaggccgtactggcccgcgatccgcgtgcggataaccagtttgtctttgccgtgcagacgaccggcatttattgtcgtccgtcctgccgcgcccgccacgcgctgcgtaaaaatgtctgcttttatcctgatgctcaccaggccgcgcaggcgggtttccgcccctgtaagcgctgtaggccggaccaggtcgaccctatggcgcagaaaaaggccaacattgcgctggcctgtcgactgcttgaacaggatgccgcgctgaacctggaggcactggcgcagcaggttgccatgagtccgttccatttccaccgcttgtttaaatccgtcaccggcatgacgccgaaagcatggcagcaggccgcgcgtgaacaacgcctgcgcaccctgcttgcacagggcggtaaaatcaccgacgccgtactggccgctggctttccggacggcagcagctactaccgtaaagccaacggcgcgctgggcatgacggcaaaacagtaccgcaacggagaggctgcggtccgctatgccatcagtgactgctcgctgggccgctgtctggtggcggaaagcgagcgcgggatctgcgcaatactgctgggtgatgacgacgccgggctgacggctgagctgctgtcactgtttccgcttgccgtccgtgaaccgatggaaggcgcgtttgccgggcgtgttcggcaggttattgcctctgtcgacagccgcgcgacgccgctgacgctgccgctggatatccgtggtaccgccttccagcagcaggtctggcaggcgctgcgggatatcccctacggtgaaacggcaagctatcagcaggtggcgaaggccattggtaaacccaatgccgtacgtgccgtggcgggggcctgcggtgccaacaaactggcgatagtcatcccctgtcaccgcgtggtgcgtaacgacggtgcgctgtcgggttatcgctggggagcagcgcgtaagatgctattgttgaaacgtgaggcgaacaacccggagggataatgctcgatctttttgctgatgctgaaccctggcacgagccgctcgcgccgggggcgacgatcctgagacgcttcgcgctttcccgcgcggcggcgctgttcgacggtattgatgccgtttccgcttgttcgccatttcgccatatggttacgccgggcgggtataccatgtccgtggcgatgaccaactgcggcgaactgggatgggcgacgaatgagcggggctatgtatatgccgcgaacgatccgctgacggatcagccgtggccgccgatgccggaggcgtttcaggcgctgtgtcatgacgccgccgtggcggccggctatcctgattttcgacccgatgcctgtcttatcaaccgctatgccgttggggcaaagctctccttgcatcaggataaggacgagccagacctgcgcgcgccgattgtctcggtatcccttgggctgcccgctgtctttcagtttggcggcctgcggcgcaacgacccgctcaaacggctgatgctggagcatggtgatgtggtggtctggggcggtgaatcacggcttttttaccacggtattcagccgcttaaacctggcgatcacccggtggcgggggcatttcgctacaacctcacgttccgtcaggcggcatacagagaataaaaataagaattattcttgatgtgtgtgaaaggcagtttacactgctggctgatttttcttgtccggattgctctgcatgcaactacttcttcttgtctggcggcagtatcgctggccttttatcgcggtgatggcgttaagccttgccagcgcggcgctggggatcggcctgattgccttcattaacgtgcgtttgatcgaaatggtcgacacgtcactctccgtcctgccggaatttctgggtttactgctgctgctgatggcagtcacgctcgggtcacagctggcgctgaccgccctcggccaccatttcgttttccgtctgcgcagtgagttcatcaaacggatccttgatactcaggtggaacgcatcgaacagctgggaagtgcctctctgctggcggggctgaccagcgatgtgcgcgccattaccatcgcctttgtgcgcctgccggagctggtgcaggggatcatcctgacatttggctcggcagcctatctcgcctggctctccagcaaaatgctggcggtaacggcgctgtggattgttattaccatctggggcgggttcctgctggtatcacgcgtctataagcacatggcggtgctgcgcgaaacggaagacaagctctataacgattatcagacggtgctggaagggcgcaaagagctgacactgaaccgcgagcgtgccgagcatatcttcaaccatctctatatcccggatgcgcacgaatatcgtcatcacattatccgcgccgatacgttccacctgagcgccgtgaactggtccaatatcatgatgctgggcgcgattggcctggtgttctggatggcgaacagcctggggtgggcggataccaacgtggcggcaacctactccctgacgctgctgtttttacgtacgccgctgctgtcggccgttggcgcactgccgacgctgctgagcgctcaggtggccttcaacaagctgaagaaattcgaccttgcgccgtttaaggctgagttcccgcgcccgcaggccttcccgaactggcaaacgctggagctgcgtaacgttaccttccgctatcaggataacgccttctccgtagggccgataaacctgaccattcatcgcggcgaactgctgttccttatcggcggcaacggcagcggcaaatctacgctggcgatgctgctgacgggcctctaccagccgcaggcgggtgaaattttgctggatggtaaagcgctgagcgcggagaaaccggaggactaccgcaagctcttctcggcggtatttaccgacgtctggctgttcgaccggctgctgggaccggaagggcagcaggcggatccggcgctggtggagaagtggcttgcgcacctgcaaatgtcgcacaagctggagcttcaggatggcaaaatcctgaatctcaagctgtcgaaagggcagaagaaacgcgtggcgctgctgctggccctggccgaagagcgtgacatcatcctgctggatgagtgggccgccgatcaggacccgcacttccgtcgcgagttttatcaggtcctgctgccgctgatgcaggcgatggggaaaaccatttttgccatcagccatgacgatcactacttcattcacgccgaccgtctgctggagatgcgcgacggcaagctgagcgagctgaccggcgatgagcgcgatgcggcgtcacgggacgcggtggcgcgtacggcctgattgcaattgtgccgggtggcgcccggcacactaatttttcatatatgccgtttttttctccatcccgacccaccgtttattcttatttacatatccccgcgctatgcttaacgccaactcatttaatggatttatgattgatgtcggtattaaagaaaaacagcgccaggcagcgtgaccaggagcgtgcgcggctcatctggctcctgacgaccgataaagcggttacgtcaacgttattgggtaagctaaccctggctgagcaatatgatgtcggcacgctggccgacgatattgctgaggtaggtgcgctggttgcacatttaccgcccccggacctggcggacaccctggaggcattgccttccgaagagcgccacgccctgtggcggctggtgcaggatcacgagcgcggtcaggtattgcttgaagcctcggaaaacgtctgggatgaccttatcgatgagatgagcgaccgggacatccttgacgccctgcaaacgctggatatcgatgagcagatttacctcgttcagcatcttccgcgcaacctgaccggacgcctgctggcttccctgcctgctgaagagcgggcgcgcgtgcgtcaggtgatgcactacgagaaaaacagcgtcggcgcgatcatggagtttggcgtcatcaccgtgcgcccggacgtcaccctgggtacggtgcagcgctatcttcgtcgcctgggcagtatgccggacaacaccgataaactgttcgtcacctcgcgggataaaactctgctcggggagctggagctgaaaacgatcctgctgaacagcacccagcagcgggtgagtgaggtcatggaaaccgagccgatggtcttctcgccggaagacgatgccgaaaaagcggcgcgtaccttcgaacgtgatgacctggtgagcgcggcggtggtggattcggtgggcaagctgatggggcgtctgaccatcgatgagatcgttgacgtggtctatgaagagaccgataacgacctgcgtgcccttggcggcatcagtgccgaagatgacgttcatgcctccgtcggcaaggccgtcaaaacgcgctgggcgtggctcgccatcaatttatgcaccgcgttcgtggcgtcccgcgttattgacggcttcgaacataccatttcccagctggtggccctggcgtcgctgatgccgattgtggcggggatcggcgggaacaccggtaaccagactatcaccatgatcgttcgcgccctggcgctggaaaatattcagccgggtaatttctcgtggctgattttcagggagatgggcgtcgcgctgattaacggcctggtctggggcggcatcatgggcggcattacctggtggctgtatgatgatatggcgctgggcggggtcatgatgctggcgatggtgctgaacctgctggtggcggcgatgatgggcgtgattatcccgttgaccatgacccggctggggcgcgaccccgcggtggggtcgagcgtgatgatcaccgccattaccgataccggcggtttctttatttttcttggactggcgacgatttttcttctgtagccagcgctttttgcttaagtcgggcagggaggatgaacatcatcacaatcccgcccagcacgccaatcgccaggttgccggtgaaaaccgttgccacaaccgtcaccagcatcacgacggtttcagccaccggcgcgtttttcagcgttccgggctgaacgctatgccagctaaaggtcttgacggccacaatggccataattcccgccagtaccgccatcggaattttggccatcacctcgctgagcgccgtaaccagcaccagcagtacgatgcccgccgcaagggtggagatacggcttctgcctttccccatctccacgttaacgatggtctgcccaatcatcgcgcagcccgcaatgccgccgtagaacccggccataatattgcccacgcccagcccgatgctctcgcggcgcttactggagggggtagcggtcagctcgtccaccagttttgccgtcaacaaggattccagcaggccaacgaaagcgatacttagcgcgcacggccagatgatgctcagggtttccagattgagcggcaccagcagttgcgtaaagcccggcaaaccgccgcccatggaaccttcatcccctaccgtcggcaggatttgcccgctggtgacggtgaacaaagtcagcagcacaatggcaatcagcggggagggcacgcttttgatatagcgtggcacccagagcacaatcagcagcgtcagcacgaacaggcccacaatcagcgggcttcggctccagaaatggggcacctgggcaaagaaaatcaaaatgccaagggcgttaacaaacccggtcatcaccgactggggaataaagcgcatcagccgcgccatacccagcgcgccgaacaggatctgaatcacgcctgccatcaccaccgcgggcagaatgtactgtacgccgtgttgatggaccatcggcccaatcaccagcgcgacggaacctgccgccgccgtcaccatggccggacgcccgccgagcagggaaagggcgaaacagagcaccacggaggcgataaggctcactttcggatccacgcccgcgaccacggaaaacgaaatcacttccgggatcagcgccagcgcggtaatcacaccggccagggtttcgcgcatcagacggtgaggcgaacgtaaaacagtggcgacatggccttcttgaggtacagacgagtggggtaatgacataacaattcgctggtaggggcaggcttccgtgcgcgcgatcacaaagtgcagcatgatagccaggaaaatcgtcgggtgccagcctgtctgccaaatccctacaaacaatccatcattaaatttcacaattacaataatttcgtaacctttaaacaatatttaaaagttgctaccgtgccaccgcagcgtgtttcacctgtaatttccacgcatcaagcactattcaactaaggcataaatgatgaaaaaaatgactgccgtgctcttttctctggccgtggggctgaacgccgtctcgatggcggcgaaggctgacgcaccaaaagagcaggaaacggatgtccttttaattggtggcggcatcatgagcgccacgctgggaacgtatcttcaggaattggagccgaactggtccatgaccatggtcgagcgcctcgatggcgtggcacaggaaagctctaacggctggaacaacgccgggacggggcactcggcactcatggaactgaactatacgccgcagaaaaaggacggttccattagtatcgagaaggcggtagagatcaacgaagcgttccagatctcacgtcagttctggtctcaccaggtgaacagcggtgtgttgcacaatccgcactccttcatcaacaccgtaccgcacatgagctttgtgtggggcgatcaaaacgtcaacttcctgcgcgcgcgctacgctgccctgcaacagagcacgcttttccgcgggatgaaatactctgaagatcacgctcaaatcaaagagtgggcgccgctggtcatggaaggccgcgatccgaaccagaaagtagcggcgacccgcactgaaattggtactgacgttaactacggtgaaatcacccgtcagctggtgtcctctctgaagaaaaaagagaactttaacctgcaactcagctccgaagtgcgtggtttcaagcgcaacgcggataacagctggagcgtgaccgttgccgatctgaaaaacaacgaagccgagcatgtgattaaggcgaagttcgtgtttatcggtgcgggcggcgcggcgctgaaactgttgcaggagtccggtattccggaagcggacgactacgcgggcttcccggtcggcggccagttcctggtgtcggaaaacccggaagtggttaaccgtcatctggctaaagtgtacggtcaggcctctgtgggcgcaccaccgatgtccgttccgcatatcgacacccgcatgctggacggtaagcgcgtagtgctgttcgggccgtttgccacattctccaccaaattcctgaaaaacggttccctgtgggatctgctgagcgcgaccacgacgtcaaacgtcaagccaatgatggacgtggggctggataacttcgatctggtgaaatacctgattagccaggtgatgctctctgatgaagaacgcttcgaggcgctgaaagagtactatccgcaggcgaagaaagaagactggcgtctgtggcaggcgggtcagcgcgtgcagattatcaaacgcgatccgaaagagggcggcgtgctgcgtctgggcaccgaagtggtaagcgacaaggatggcaccattgccgcgctgctgggggcatctccgggggcgtctaccgctgcgccaatcatgctgcacctgatggaaaaagtgtttaaggacaaagtatccagcccggaatggcaggcgaagctgaaaaccattattccatcctacggtacgaagctgaacggtaacgttgaagccacggaacaagagctggaatacaccagccgcgttctgcaactgcaatacgtcaaaccgcaggctgcggatgctgcgtcacaggcagagctgaaacctcaggcggaaagcaagccggtagcggatatcgcgctgtaaggtaaacgcaaaacggtaacatctgttaccgtttttagtgctttctccctctcccggtgggagagggttggggtgagggcaccagaacgcaccctttccaggtcgggtaagcgagagcgccacccgacttatttttaacgaactaccgcttgtcctaccgtctcatccgctttccatacgcgatatttcacatccacgttttccggcgtgtatacgacgatcggcagcttgctgttatagcgcagcagactgttatcacccagatacgcggtaataaatttcttctctttcttgccgtccgggcacgccatcatggtggagactggcgaggttactttgtcgaagacatagtagtcatagccccagccttccagcgttttgctttccagctggccgcccaggcgatgctggttgcagtccacttccagtgtctggccgattaacagctcaactttgaaatttgcttcatcctgctgagccgggagctgaataacctggcgcttcatccctttgtccgcttgcggatacggagcaactttttccagcggctgctctttccgggtttcgctggcgaaagcactagtgctggcgcacgcagcggcgatgagggcgatggcaaatttaggtgcgtttttcactgtcattcctttttgttaaaacgatcctggaaagactaacatatagcacgtgaatagttggcgcaatttactcatattttcattttaaatggagtaatgcactgcttttatgttcatttattggtgtttaatgctgtgttggagtcgatgcggcaatcgtgttattttacgcgttaattactgttattcatctgtaaagggaggggagatggtacgtgaaaaactgaagacacctgaaggccgcaagttcctgctggcgttactggttgtgtttatgattgctgctgcatgcgtggggcgagcaaccattgtcggtgtgattgagcagtacaacatcccgctctctgcctggacaaccagcatgtttgtcctgcaatcggcgatgatctttgtttacagcctggtgtttaccgtcctgctggcgattccgctggggattttctttctcggtgggcgtgaaaaacactaagcattgcgcatgcggagacaggcaataaaaaaccagccataagcggctnnnnnnnnnnnnnnnnnnnnnnnnnnnnnnnnnnnnnnnnnnnnnnnnnnnnnnnnnnnnnnnnnnnnnnnnnnnnnnnnnnnnnnnnnnnnnnnnnnnnnnnnnnnnnnnnnnnnnnnnnnnnnnnnnnnnnnnnnnnnnnnnnnnnnnnnnnnnnnnnnnnnnnnnnnnnnnnnnnnnnnnnnnnnnnnnnnnnnnnnnnnnnnnnnnnnnnnnnnnnnnnnnnnnnnnnnnnnnnnnnnnnnnnnnnnnnnnnnnnnnnnnnnnnnnnnnnnnnnnnnnnnnnnnnnnnnnnnnnnnnnnnnnnnnnnnnnnnnnnnnnnnnnnnnnnnnnnnnnnnnnnnnnnnnnnnnnnnnnnnnnnnnnnnnnnnnnnnnnnnnnnnnnnnnnnnnnnnnnnnnnnnnnnnnnnnnnnnnnnnnnnnnnnnnnnnnnnnnnnnnnnnnnnnnnnnnnnnnnnnaatcagttagcgataaagcgcttctcgtctgtcagcacctgcaacagcaaactgagctgcggcttctggtctttcagcttctcaccttcgaggttatacgtctggtaattgccattgctgttcagcaccagggacaacgtcggcgtggtcaccaccagcgtgtttccgccagcagccgtgacccagttatgacgccgcgtggcgctaaagaggtcttgtccctgcgagtactcaattgccggtgtgctgacgtgcagcagccgttgcattaacgtggtcatgacgtctttatggtcggtgagcatgttgatgcgctgcgcgggagtgcccggccagtggatcaccaggggaacatgcaggttcggacgcgaccactccatgcccttcgcctcgtcgccgagcggcacgccatgccccgccgtgataatcacgaccgtattatccagcttgcccgcgtcgcgcagggcggtcagcacgcggccgatctgcgcatcgacatcgcccgccgcacggctatagcggcgcgcgaagcctttctgattgctgtcatcaagcgttgtgccgttaaacgcaacccaggagaaccagcggttatcttcctgcgcatagcgcttcagccagtctatccactggtcagcggtccgatcgtcagactggctctgcgcggcgggcagtgagaaatcagacagcagcgcctggcggtacagcgagctgttgaaaccatcagaggcgaacagccccagctggtagccctgctgattaagcccggtaatcaatgccgccggaatacgggccgacagcacgccgtccatatagctcggtgaaatgccgtagaacaggccgaaaatacccgcgtcggtcgaattaccggagctcatatgctgagtgaatacgatgttgttctcagcgaattcagccagcgctggcatctgcttctcatagcgggaatagttcaggccatcgacggtaatcagcagcacgttctgaccgcggcccatgtcgcgatatttcagatcgctcaggggatactgcacgctgaccgcttccggattaccctgttcgaccagacgacgctgatactcctgcgcgtccagcaggccgtgttttcgaggaaacgacgcgccgtcatcggataggagagcggcaggttcgcgcgctgcatggtaatcgggcggtagaagttcgcatctgcccagatatacatcaggtgcgaaccgataaatgaggcgaaaaagagcgccgcgacgggcttcgcataatggcggcgtcgggtcagactgcggagtttttgccagctccacgtggcgaacagcatttcgatcagcaggataatcggcacgctgataaacatcagctgccagtcgcgcgcggtctcgttctgatccgggttaatcaccagctcccagacgacaggattcaggtgcaggtggaagcgggtaaagacttcgctgtcgatcagcaacagcgtcatgcccgccgtcgcaagaatggcggacaggaagcgcatcagccgctgcgacatgacgataaacgtcagtgggaacaggatcagcagataggtggcgaagaccagaaagctaaagtgaccaacaaggctcatccacgagtagatgcgcccggttaacgtggttggccagtccgccacaaacagataacggcagccgagcaccatcgccaacagaatgttgaacagggcaaaccagtgcccccagctgaccatctgggagactttttcacggtagcgctgacgattcgtcaccataaactgttgttcgtttcccttagtgtgcctggtcgtcgctaacggaggactgcaaagcctgggcgaaagatttggcgatcgcctgacgctgagccggagcaacgctggtattgatcaggttggtaaccatatttcccaaaaccatcagggagagatcggttggcgttttatgtttttccagtacgttgaccagctcactgagcaattgttcaacgtgttcgtcactgtagcgggaatgttgtggcataaatcaaaatcagtttgttgagagaagggcgacatattaccgtagcaacagctttttttccccttttttatcttctgttgcacacatgcgttggtggtggttgaataccgcccggtctaaaaggagagtttatcatgagtctggaaatcaaccagattgccttgcaccagcttatcaagcgtgatgagcaaacccttgaagtggtgctgcgcgattcgttactggaaccaacgcctaccgttgtcgagatgatggcggagttgcatcgcgtctacagcgcgaaaaataaagcctatggcttgttcagcgaagagagcgaactggcggatagcctgcgcctgcaacgtcagggcgaagaggatttcctggcattcagccgcgctgctactggccgtctgcgtgacgagctggcgaaatatcccttcgccgatggcggtatcgtcctgttctgccactaccgctatctggcggtagagtatctgctggtcaccgtgctgaataacttaagcagtatgcgcgtgaacgagcagctggatatcagctcaacgcactacctggatatcaaccatgcggatattgtggcgcgtatcgatttaaccgaatgggaaaccaacccggaatcaacgcgctatctgaccttccttaaaggccgcgtgggccgcaaagtggcggatttctttatggacttcctcggcgccagcgaagggctgaatgccaaagcgcagaacaaaggtctcctccaggcggtggatgactttacggctgaggcgcagcttgataaatctgagcgtcagaccgtgcgtcagcaggtttacagctactgcaacgagcagttacaggctggagaagagattgagctggagtcgctgtccaaagagctggcaggcgtcagcgaagtcagcttccaggaatttactgtggaaaaaggctatgagctggaagagagcttcccggcggatcgcagtacgctgcgtcagctgacgaaatttgccggtagcggcggtgggttaaccattaactttgatgccatgctgctcggggaacgtatcttctgggacccggccaccgacacgctgaccattaaaggcacgccgccgaatctgcgcgaccagcttcagcgtcgcacctcaggcggtaagtaacagccataaaaaaaccccgcaaacgcggggtttttctcgacaggtttgcgattacgcgcgaacgaagtcgatgtgagtcagttttggcttgaacgcgtgacgctgaacagcctgaactttcactttttcttctttaccgtcaacaacgatggtcagaacttcgctgtagaattcagctttgttctgcatgttccatactttgtcgtgatccagttcaatagcaactggagcagcttcgccaccgtaaacgatagccgggaacttgtttgcggtacgcaggcggcggctcgcacccttaccctgcacgttacgtacttctgcttcgatagtgaacattgatttctctctgtatttaaaaccctactacaggcgacccagcagcaggtgagtgttctgcctcacggatgtgaagcgggcggcattttatactcaaatggctcgcgcatcaacgaaaagtcccgttaaccgcgcaattcgtttgcccggcgaaagcgtccttcatagtcaaagaccttctcacgcacctgccagaactgcccttttttacgggcgacaacaaaatcaggatggcgcagtaacgcctgctggcgcacgatatcggccacggttatccagcgcagcggcacgccaggcgtgcgggtatgcgggcggataaagagctgctcgaacgcggtgcgctgggcgggcgtctggacccggaaccgctcgctgacgtctgcgccatcctcgtcgtagtaggtaatttttagccactcgcctttttcatccgcgccgggctgtaaggccatgccggaacagcgcagcaccagcgcatctttcagcttcagcgccgccttcagcatgtcgtccgggtcgaccaggaccgtgtcgcactcccgacagcggcgggcggcaatgtcgttttcggcattgcactgcgggcagtttttgaagcggaagcggaagtcacactgttcgcgatggccttcatcgtcttcaaaccagccctgacagcggcggccaaaatgttcgatcagcgtgccgtcggcggtggttttcccccagaaggtgttggcaaacccgcaggcagggcaaaaaacctgaacgggcacgttgtcgctcttgccttttggcgtgccgacttccggcgaatagagatcgtgcgggttaccggcgtaatcaaggatcagacagtcggttttgcccggcgccagacgcagcccgcggccaacaatctgctgatacaggctgacggattccgtcgggcgaagaatcgcaatcaggtcgacgtgcggggcgtcaaagccggtggttagtacggagacattcaccagatagcggaaccgctgagctttgaagtcctcaatcaggctgtcgcgctccaggccgggggtttcaccggtaattaacgccgcgtcgtcggcgggcagcagccccgtaatttcgcgcgcgtgttcgacagtggcagcaaaaatcatcacccctttgcgcgtttgcgcgaactcttcaatctggctgatgatatgcggcgtgatccgcttctgttttttcagctcatggttaagatctgcctcgctgaacagcccgttgctctgcgcctgtaaacggctgaaatcgtactgcacgacgggcatatccagccgctccggcggcgtcaggtagccgtgcttgatcatgtagcgcagcggaagctcatagatacagtcgcggaacagggccttttcatcgccacgcaccatgccgtgataatgaaactgataaatccagcccttgcccagacgaaacggcgtggcggtgaggccaagcagacggaggtgaggattcacctttttcaaatgagtgaggatttgctgatactggctgtcgtcgtcatcgctgatgcggtgacactcatcgacaatcagcagggaaaactcgctgcgaaacagttccaggttgcgcgcaacggattgtacgctgccaaacaccacttttccgtggctctctttgcgcttcagtccggcggcaaaaatgtcggcctccaggccgagcgcgcaatatttggcgtggttttgcgccaccagctctttgacgtgcgccagcaccagcacgcgtccgcgggccaggcgcgccagttcggcaatcaccaggcttttaccggctccggtcgggagaacgatggcggcgggctcccgatgcttgcgaaaccaggcgagggtggcatcaacggcttcctgctgataggggcgtaatgtgaacgtcatggcttctctattcagttaactcgcatatagtatgccacgaaactttttcccttgagtggcgcaaccagaccattatactgaactgtttctgactgcttctttttcggacgcgtagtccgacttccagcaccattaaggctaaaaagatttcatgcgacttgataagtttatcgctcagcaactcggcgtaagccgggctattgccgggcgtgaaattcgcgccagccgcgtaaccgtggacggcgacattgtgaaagacagcgcttttaaactccagcctgagcaccaggtggagtatgacggcaacccgctgacccagcagaatggcccgcgctacttcatgctcaacaaaccggaaggttacgtctgttcaacggacgatccggatcacccgacggtgctctatttcctcgacgaacctgtggcgcacaagctgcatgcggcagggcgactggatatcgataccaccggcctggtgctgatgaccgatgacggccagtggtcgcaccgcatcacctccccgcgccatcactgtgataaaacctatcgggtgatgcttgagtctccggtctcggatgacacggcagagcaattcgcgaaaggcgttcagctgcataatgagaaggatctgaccaaaccggcggtgctggaaatcctcacccccacggacgtccgtctgaccatcagtgaaggccgctaccatcaggtgaagcggatgtttgccgccgtgggcaaccacgttgtggggctgcatcgtgaacgtatcggcgcgattgaactcgatccagacctggccccaggggaatatcgcccgctgacggaagaagagattgccagcgtcgggctgccttcacgctaaattcaggagaaccctgtgaccaccaggccacactcgtcgtttaaaattgtatttatccttggcctgctggccatgctgatgccgctgtctatcgatatgtatctgcccgcgctgccggtgatttccgcgcagtttggcgtaccggcaggcagcgcgcagatgacgctcagcacctacattcttggttttgccctcggtcagctcttttatggcccaatggccgacagcctggggcgtaaaccggttatcctgggcgggacattgatatttgccgcggcggcggtggcctgcgcgctggcgcagagtatcgatcagctgattgtgatgcgcttcttccatggcctggcggcggctgcggcaagcgtggtgattaacgcgctgatgcgcgacgtctacccgaaggaagagttttcacgcatgatgtcgttcgtcatgctggtcacgaccattgcgccgctggtcgcccccatggtgggcggggcggtcctggtgtggttcagctggcatgcgattttctggatcctggcgattgccgcgctgctggcctcggtgatgatcttcgtctttatcgatgaaacgctgccggtcgagcgacgtcagaagttccacgttcgcaccacgcttggcaactttgcctcgctgtttcgccataaacgtgtgctgagctatatgctggccagcggcttcagctttgccggaatgttttcgttcctgagcgcggggccgtttgtgtacatcgaactgaaccatgtgtcaccccagcattttggttactacttcgcgctgaatattgtgttcctgtttgtgatgaccattatcaacagccgctttgtccggcgggttggggcgctgaatatgttccgcgccgggctgtggatccagttcgtgatggctatctggctggtattgagcgcgttgctgggcgtcggtttctgggcgctggtggtgggcgtggcggcgtttgtcggctgcgtgtcgatggtttcatccaacgcgatggcggtgatcctcgacgaatttccgcatatggcaggcaccgcctcgtcgctggcaggaacgttccgtttcggaattggcgcgatagtcggggcgctgctctcgacggcgacgtttaatactgcctggccgatgctgtgggcgattgccctctgcgcgacctgctccattctcttctatctttacgccagccggccgcgaaagacggcgcataaatgaccacttaaggcccgtgacgggcctttttgttgacccatatcaaccaaccctccgttcgtttaccctgtgtttgtttcttttatgtaaaatctatttatgtaaaaagtcacatcattgtatttaaaaaggttgagttagatcgcagaaacgggtacatatagcgccgacgcgagcctgcaacgcctataaaatccgctaaacagtgcaggttggcgatgatgtgttactattaatgtaaataaattgtgaagtaaatttgcttccggggatctgaacgtgaatacattacaactctccattgtccatcgcttgccccagagctatcgctggtcgacgggttttgcaggttcgaaagttgaaccgattccgcaaagcgttgccggggaggataattgtctggtggccctcaaactgctcagcccgagcgatgaaaatgcgtggccggtcatggaacgtctcagccaggcgctgacggacatcgaagtggacagctccgtgctggaatgcgaaggtgagccgtgcctgtttgttaacagccaggatgagtttgccgccacctgtcggctgaaaaacttcggcgtggccattgccgagccgttctctggtcaatatcctttctgagtgttagtcagcggacaatagctggcgcgtgtaatcctgcgtcggcgcggtgaatacgcgctggcattctccctgctcaacgacttctccctgccgcaataccaccacctgatggcaaagcgcacgcaccacctgtaaatcgtggctgataaagatataggccagccgatgcttttcctgtagccccttcagcagcgccagaatttgcgcctgcacggtgcggtccagggaagaggttggctcgtccagcacgatcagctccggtttcaggatcagcgcgcgggcaatcgctatacgctgacgctgtccgccagaaaactcagccggataccggtgccgggtctcgggatctaaacccacttccgccatcacccgcatcacgtcgatttcacgctgttgcgccgtcattgtcggctggtggacgcgcaggccctcctcaataatctgcaaaacgctcaggcgcgggttaagcgaagagtttggatcctgaaataccacctgcatccgcgggcggacggggagcatcatccggcgattcaggttttgcagcggcatgccgtcaaagacaatgcttccctgagaggcgatcaggcgcagcagcgccagaccggtggtacttttgcccgagccggattcgcccacaagcccaagcgactcgcccggacgcagagcgaagctcatgtctttcaggacatgattgtgatcgaccacgcgacgcaaaatgcctttgcggatcgggaatgacaccgacagcccctcaaccctcagcaacggcgcgctgtcagcgttaagcggaaccgggtcgccagcgggttcgctatcaagcaggcgctgtgtatacgggtgctgaggcgcgctcagcagggcggatgcccggttctgttccacgcagcgaccgttttgcatcacggccaccgcgtcagcgagctttttcacgatgctcaggttgtgcgtaataaacagcaggctcatgttcagctcgtcgcgcagttcgcgcagcagttgcagaatttgtgcctgtaccgtgacgtccagcgcggtagtaggttcatcggcaatcagcagttcggggcgcgtgagcagggccattgcaatcatcacgcgctggcgctcgccgccggaaagctggtgcgggaaatcgttcatccgtttcgccgcattacggataccggtgcgttcaaggcagtccagaatttcaccccgcgctgcctctttacgcattccccgatgaagtgacagcacttcatagagctgtttttccagggtatgcagtgggttgagcgacaccatcggctcctgaaaaatcatggcgatgttgttgccacgaatgccgcgcagggtttgctcgtcagcgttcagcagcgattgtccatggaacagaatatccccctgcggatagctgaccggcggggaagggagcaggcgcagcaccgacagcgccgaaacgctcttgccggagccggattccccgaccagcgccagcgtctctccgcgctggatcttcaacgataaatccgtcaccaccgtgcgtgattcgccctgttttgaaaacgcaatcgacaggttctctatgctcagaagaggccgggtcatgtcataccgccttgttgggatcgaaggcatcgcgcacggcttcgccaataaaaatcagcagggaaagcagcaccgccacggagaggaatgcggcgatgcccagccagggggcctggagattgtttttgccctgcaacagcagttcgccaagggacggtgagcccagcggcaaaccgaaaccaagaaaatcaagcgacgtcagggtggtgatggagctgcacaaaataaacggcaggaaggtaagggtcgccaccaccgcattgggaagcatgtggcggaagatgattgcgccatcgctcacgcctaacgcctgcgcagcgcgaatatagtcgtaattccgcgtacgcagaaactccgcgcgtaccacgccgaccagcgccatccagccgaacaggacggtgatcccgagcagccaccagaagccaggctgtaccacgctggacagcaggataatcagaaacagcgtcggcataccggaccagacttcaatcacgcgctgtccccataaatctattttacccccgtaatagccctgcacggcgcccgccacaacgcccattacgctgctaaagagcgtcagcagtagcccaaacaggagcgagatgcgggtgccatagagaatgcgcgccagcacatcgccgccgttggcgtccgttcccagccagttttgcgcggaaggcggcgaagggaagggggtggacgtggcgaagttaatactgttcgcgccaaaacgaatcggtgcccagatagcccagccgtgctgcgctatctgttcacgtaaccagggatcctggtactcggctggcgtcgcaaacgggccgccaaaatcgctttcgctgtaggtggtcagcaccggcacataccagcggtctttgaaatgcaccagcaggggtttatcgttggcaatcagttccgaacacatacttaaggcgaacaggacggcgaagatccacagcgaccagtagccgcgacggttgtggcgaaaacgcgcccagcgggcctgattgacggggcttaaacgcgacatcagcggccctcaaaatcgatacggggatcgaccagcgtatagctgatatcgctgatgatgttcagcagcaggccgatcagggtgaaaatgtagagcgtgccaaacatcaccggataatcacgggagacggtggcctcatagcccagcagccctaatccgttgagcgagaacatcacctctatcagcagcgagccggtaaaaaacatactgatgaacgtggcggggaaaccggcaatcaccagcagcatggcgttacgaaaaacgtgcttccacatgatctgcttttcaccgacacccttggcgcgcgcggtgacgacgtactgtttgcggatctcatcaagaaaggcgtttttggtcagcatcgtaagcgccgcaaaaccgccgatgaccgtcgccagcaccggaagcgtgatgtgccagaagtaatcggtgattttctgataccacggcagggtgctgaaatccgcagagaccagcccgcgcagcgggaagaggtcgaaataactgccgccggcgaaaaagacaatcagcagcacggcaaacagaaacgccgggatagcgtagccgatgataatgaatgtgctgctccagatatcaaaacggctaccgttgtagaccgcttttcggatccccagcggaatggagaccagataaataatcagcgtcccccacagtccgagcgtgatggaaaccggcaggctttgtttgatcagggttaacaccgaggcgctgcgaaacaggctgtcgccaaaatcgaaacggacataatcccagagcatcctgaaataacgctcgtgcagcggcttgtcaaaaccatagcgatgggtgatctcggcgatcacctccggatccagtccgcgaccgccccggtagtggctttcgctgatgttgcccacgcccgtccgggcatggctggcccccattccttcaccgccgccgcccggcatgccgccagcgtgaccaaattctattgccgcaattgcctggtccaccggaccgccgggggcgatctggacgataaaaaagttaatggtaatgatggcccacagcgtcgggatcactaacagcagccggcggataagataagcgcccatcgtcactccttaacgccgctctgcgggcagttttgcggctttattcacgtcataccaccaggtgtcaaagccgagggtgtagaccgggcgaacggcaggcagggagaatttatcccagcgggccacgcgatcttcgcccatataccacatcggcagcatgtaatagttccaggttaagacccgatcgagcgcgcggccaagcggcagaagcttgttcttatcgccctgagcggcgacaatttttgcaatcagcgcatctatcaccgggctctttacgcccggggcgttgtaggaggagtcgatataacccgatgcccaggagatttgcagatctgaactcggccacggctgcgcggcccacagggtctgcatcatgtcgtaatcgcgactgcgcttgcggttggttaactgggccatatcgacctggcggatattcatggtgacgccaagccgggcaaggttcttcttaaatggcagcacccactgatcgtttgcgccggaggcaatcagcagttcgaagctgagcggtttaccggtttgcacattaacccgttgccgatttttcagcacccagccagcatcatccagcaggttgctagctttcagcaggttgtcccggtcgaacccgtttccgtcggatttgggcggttcaaatacgcgggtgaacacctccggcgggagctccgctttcattggcgccagcaaaaccagctcgtccgcgtggggataatcacgggcggcatattcagtattctggaaatagctgttcgcccggctgtaggctccgtaaaacagcgctttgttcatccattcgaaatcaaacgccagggtaatggcttcacgcacccgacgatcggaaaaaaccgggcgctgaatattaaacgccagccagcgcgtgtcctgcgcggattcgtttttgtgttcgtctttaacgatatagcctttcgcgaaattttttccgatatagcgggtcggcccaannnnnnnnnnnnnnnnnnnnnnnnnnnnnnnnnnnnnnnnnnnnnnnnnnnnnnnnnnnnnnnnnnnnnnnnnnnnnnnnnnnnnnnnnnnnnnnnnnnnnnnnnnnnnnnnnnnnnnnnnnnnnnnnnnnnnnnnnnnnnnnnnnnnnnnnnnnnnnnnnnnnnnnnnnnnnnnnnnnnnnnnnnnnnnnnnnnnnnnnnnnnnnnnnnnnnnnnnnnnnnnnnnnnnnnnnnnnnnnnnnnnnnnnnnnnnnnnnnnnnnnnnnnnnnnnnnnnnnnnnnnnnnnnnnnnnnnnnnnnnnnnnnnnnnnnnnnnnnnnnnnnnnnnnnnnnngtaccttaaatgcctcgaaggccacgttatcatccaggtagtagtcgtagcggattgtatcgaagttccagcggccccggtttaccggcagcgtggctgcccagtaatctttcacccgggaatagatcacgtactggcccattcgccagtcggtaatgcgatacggccctccggccagcggcggggtagagaggggatcgctcagcttatgatttttccagaaggattcgggcatgacgggcagggagaacaggctcagcatattctctttgttcggctcagggagttcgattcgcacggtcagcggggcgatggctttcaccgtggtgcccttgtacaccagacgaaactgcggcacgccttcggtcataaatttatgaaaggtgaatgccacgtcacgggcgctaaccggcgtaccgtcgtgaaaacgcgcccgcggattaatcgcgatttctgcccagctgaaatcatcggcgtaacgcacgttctcagcaaccaggggataatagctgccgggctcgtcgtcggaggtgacgaacagcgtgtcatagagggattcggtacgcgctgccgccacgccgcgcagggcaaagcggttaaagttgtcaaacgttcccgtggcggaaagcgtcacgtttccgcctttcggggcggcggggttaacgtaatcgtagtggttaaagttaaccgcgtacttcggctcgccaatgacggcaaaggccgtgctctctttgatggtctgcgcctggctcgacaggctcaccagcgccaatagcgtcaacacaacgcgcataatcatagtgcggcggatccctttgttcacaggcaggctcggttgaacagaataataagggacagcgccgtgattgtgaaattattccccgagcgtgatgtcgggttgccacgtcctgaactgctccagcggcatcgggcggccgatccagtagccctgaagatagttcacgccatgctcgcgcagccacgccgcctgctccggcgtttcaacaccctcggcaacggttaacatattcaggcgttctgccagcgtcagcaccgcgtcaagcactggcgaggtgacggtttcagtcccgatggcattcacgaagccacggtcaattttcaggtaatccatcgtaaagcgttccagatagatcagcgcgctgtggccggtgccaaaatcatcgatggcaatttcaaaaccttcttcgtgcagccattcgaacagctgattagcctcgcggtggttgatcatatcgcgctcggttatttccagcacaatctggaagtgatcgggtggaagggcggcggcaaacgcgcgcatatcctctttaaagctttccgcatgcagatgcccgggcgcgatgttgatcccaaacttggccccaggcgggagcaccgtttgcaggacaggggcatcgcggataatcaggtcaaaaagatgcagcgtcagcgggacaatcagcttctgcgcttcagcgaaattaataaaggcatccggtggaatttctcccatcaccggatgcttccagcgcatcaggacttccagcccggtcattttgagcgactgcgcatccacgacgggttgatagaccacgtaaaactggtcgcgtttgatggccgttaggatctctttccccggattaagacggatagtaagaatatagaaattcaacaggcccgccgcgataccgcagaccaggccgaaaaacagggcgtacagcacttcatcggtcgtccaggcttccgcataaacatggatggtcagaggcacatttttcagcgtggcggtacggaccgggatatcaggcaaatcacgtgcagggaccagcgttccggaatgggttgataacgcataatcgccaataatgatggaaataccggcaaactcatcctgtcttgaggtgtagaggagataaggagtcaggttaagattaacggaggtaaatacaccgccgtccttcaccagtgggttgcgataccagatggcaatcgcgggcttgtccggcatcatgggggtgcccggcaggagcgccatatcaacctgtttattgatgtgcagttcaggaataagcgcttccagagggacattcatcgggccggtggcggaagagcagtaggcgtttttatccctgaccagcaaaaaggcgcgcacgttgatgctaaaggccgcccgggaggtcagggcggcactcacttcctcgcagctgtttagcgtgagtggctggagtgtatcaatcgacattttgagctcatcgaaatagctctccatgtagacgcttaaatcggtaataagggtatcgaatctgacgtctcgcttgtggtaactccagtaaaactgtaatgctcccaggagcagggcagtgaataaccccgtaaggaaactgagaaacagaatcttgcggttgctggagaagtagcgggtaaacatagatgtcgtgattcctgaaatgccgctggatagttatcagtgtaacgggcaaaaaaaaacactgccggagcagtgctttttttatcgtatcgccagccaagggataaccaacgatacgacagcaatattaactacggctcagaacgcggcgagcttcgttgtagcgcttcttccagtaaggttcgttcatgctggaaatcgtcacaccactgctggtggaagcatggacaaactgatcgttaccgatatagatgccaacgtgtcgaccggttgaacccgctctgaacaggactaaatcgcccgtgcgcagtttagtgcgcgaaatggatttacccatttcctgctgttcataagtagaacgcggaaggtctaacccaaactgctcacggaacgtacgctgtacgaacgcggaacaatcgatgcctttcttggtgctgccgcccagacggtaacgcacgcctttccagtcagcatactgatccataatacgcgacttaacgtcgagattacgtaccatattttcaaattcatcctgagaggcttgcagtgaagaggaatcttccattcccacaacacgcgtctcaggatgcatattcttcgcggtgttcgtcgtactacatgccgaaagcagaaccgccactgcaatcgccgggatcccccgcaagatatatctcaagattggttgagatttgaccattttgtttgttttcccttgaagtccttaacgaaaatatcgttataaaaatgccaaccgtgacgagactaataatctgttcacaatgagacaattctttatggtgaaaactgtggctcaacgcacaaaattattcaccatgataataattatctcagtggggcaaaacgagttcgaggttaaccgattgcacggggtattgcgagcaaaaaagtccgtttttttataagaaaatgtgatacacaaagttacagcgcggaattgctcaaaatgccgccattcatatcggtaatccctgcaattgcttcatttttatcacgaattgtatgacgggatgatgacagcgttgaatgacgccgaaaagaagtgacgcagggatcgaaaacgatccctgatgaatggtgttaattttcgttatttatttgtttccagcttgtttaaatttgccaggaagatagcgatcaaaaatgtctattatgcgatcgctcaggggggtcatcagcacccacggtaaaccaattaacaccgccgtgagggagcctacggcgatatctgtcagccagtgagcgccaatcatcacccgcgggaatgcaaataccaccacaataaccagggcgatggtgaaggcttttttaccaaaatagcgcagcatgaagcctgcaaaaatcagcagcatcataccgtggtcgcccgggaaactgtccttcgaggcgatctttggttggaatatgaagcagctcgctgacgcggttaatattacgggaaaaagagcgaaggactggcgcgtttaaccggcatcagatgctgcgccagctggttgataatcacggccgtcagcagcatcaccaggccgataatcagaatacggcgacgacccgttttgtcttccttcagccagaaggagagcatcagacagcccattgccagcagcgaacagccgtcaaacgcgcggttgttggtgatcgccaccagccacaggaaggcttcactcttcgccagcgcctggttaaagaagtggaacagcccggaatccagcgggaaccagaaaccgtgatccgccgggatataccaggagaaaaagatcgccaggccggcagcgttgagcaataaaatagcaggaagtcgagtcgtcatagtcttcagcaatgtgtgaaatcaggggcaacgttagccgcccaaacttaaacgaagcttcaacaggcttgactggagggcattccagtcggtattaaccgcactaattaactctatccggctgtcgggtggcgcgacgttctgggtttcaataaagaaatcctcgccctgacggttaatgcgcaccagaccatccggagtgcgcatgatcccttttacccgctcaaccggcgcgagtctcgcccattccagtataccaatggtgtcgaaaaccgtatcggcatcgaagatccacccgcaggcctgatgcccctggccgctgttcaggttgcgacgccagcgctgatgctccggcaggctcagtgcagccaggccttgcttcgcgccgtggctatgcgaatgctcagcgctggcaggcagttgcgtctggttgaggcggggaaggtcgagcagggcgccatcaatgttgccctgggtcgtctgcacatactgacgtccaccgccagcctgctgccaccaggactggaacgcggcctgactctcagctgtcgcgcgatcggatttattcgccacgataatatctgccgaggcgagctggtcgcggaaattgtcattattgatcgctttttcatccagcagctggcggggggtcgagcaggcaaagcgtcgcacgcagctcaagccacggctcgtataccggggcggtcagtaaatcaaggatttgcttaggatgccccagcccggtgggctcaatcagcagacggtccggcttgccctgacgcagcagcgtattcagcccgacctgcatcggcagaccattcacgcagcacatacacccgcccgggatctctttcaccatcgcgccgctgtcggcgagcaacgcgccgtcgatccccacttcgccaaattcgttgaccagcacggcccacttttccgccgggtctttattggccagcaaatgcagaatggacgtagttttaccgctgccgagaaaaccggtgatcaggttggttttggtcacgtgcgctccgataaataattgtgatgtagtaacaactatctatcatcctgacgaaaaaatcgggcattgagaagagggagggcgaacggagcataaaaccgttcgccttaaacgcaataatcgctaaatttttaacgtttcgataacggcctggcgcgcgccgagccggacgaggcgctggtacgcgctggtgattgcctcgacaaagacagggttttgcggcaggtcgtcgccaaagatttcatttagcgtcagcagggcgctaacgcgttctgcgtcgctgctggtagcgacaatggcctgaaacttgtcgctcagcggatcgcgtacgtcaatggcgttgccctgttcgtccgtaccgctgacgtagcgcatccagcccgccacccccagcgccagtaatggccaggcggtgttacgctcaagatgcacgcggatcccatccagcatgcgctgaggcagcttctggctgccgtccatggcgatttgccatgtacgatgctgtagggccgggttggcgaagcggtcaagcaggctgtcagcataggctgtcagatcaacgttggtgatgcgcagcgtaggggcctgctcattcagcatcagcctgcgggccgcctcgcggaaactgtcgtcctgcatacattcatttatgtgcgcgtagccggcaaggtagcccagatacgcgaggaaggagtgactgccgttcagcatccgcagcttcatctgctcccagggcaggacatcctcaaccatctgtacgcctgccacctcccactccggacgcccggcgacaaagttatcttccactacccactgaatgaacggttcacagctgatggcgcagggatcttcaacgccaagttcctgggtgatttccgcgagtgaggcgtcggtggcggcgggcacgattcggtcgaccatggtgccagggaagctcacgtgcgcctcgatccatgcggccagctctgcggaacgctttccggccatgccgagaacggcatttttcaccacgtggccgttgtcgggaatattgtcgcaggagagcacggtaaacgccggcaggccccgctcgcggcggcgatgaagcgcttcaaccagaatacccggcgcggaatgcggctcagacgggtgctcgagatcgtgcaggatgcggctattccgcatatccagttttcccgtcgccggatcgatgcagtagcctttttcggtaatggtgagggagacaattgccacctgcggttcgcagaatttctcaataatggctgccagcgagtcgagtttggcgttcaggcactcttttaccgcaccgataataatgggctgattgccttcggcacctttctccagcacggtaaacagatgatcctgcgcccggagctggcccataaggacatcgccgctaaagaggctaatctcacaaattccccagtcgcctcctttggcattcagtacccggtttgttaacaacgcctgatgcgcccggtggaacgcgccaaaaccgaaatggacgatgcgggagtgtaactgctcgcgatcgtagcggggctgctggacatgagcaggaagcgcggtggaggcaatagtcttcatgtaatacacacctgattaaccattaattaacaatgccagtgtaaagttatatgacaacaaattaaattggtaagccgtaaatatccctgttatgtgagtttgatcaatcaatgccgcgtgctgtattgaccacttcgattaaacatgtatggtagtcgtcattgaagtaacacatattggtataacaacttgagagggtggggcaatggaacaaacctggcgttggtacgggccgaacgatccggtttctcttgatgatgtgcgtcaggctggcgcaacgggtgtagtcacggcgctgcatcatattccgaacggtcaggtgtggccggtagaggaaatccaaaagcgtcaggctcagctggcagagaaggggttaacctggtctgttgtggaaagtattccggttcacgaagatatcaaaacccactccggtgagtgtgatacctggattgcgaattatcagcagagcattcgtaacctggcagcctgtggtattgataccgtctgctacaactttatgccgattctggactggacgcgtaccgacctggaatatgaaatggccgatggttcgaaggcgctgcgtttcgatcaaatcgcttttgcggctttcgaactgcacattctgaagcgtccgggggcggaagcagactacactgccgaagagcaacagcaggcgctggcgtggttcaatgccgccagtgaagcggacattgagaagctggttcgcaatatcatcgcgggcctgccgggggcggaagagggttataccctcgatcagttccgcgcgcgcctggcggaatatggcgatatcgataaaaaccagctgcgtgaaaacatggcgcacttcctgcgcgctattgtgccggtggcagaagaagtcggcgtgcggctggcggttcatcctgacgatccaccgcgccctatcctcggcctgccgcgtatcgtgtctacgattgaagatatgcagtggctgaaagagacggtggacagcatctacaacggctttaccatgtgtacgggctcgtatggcgtgcgggcggataacgatctggtgcggatgatcgaaaccttcggcgatcgcattcatttcacccacctgcgtgcaacctgccgtgaagagaacccgaaaaccttccacgaagcagcccatcttggcggcgacgtgaacatggttgcggtggtggatgccattctctctgaagaggttcgtcgtaagcaggcgggggatgtgcgtcctatcccgttccgtccggatcacgggcaccagatgctggacgatctgcgcaagaaaacgaatccagggtattcggcgattggccgtctgaaagggatggcggaagtgcgcggtatcgagctggcgctgaaaatgacgaagtatcctgaacttctttaagcctgatcgcccggtggcgctacgcttaccgggcctacgaaaaaccggctctgaggccggtttttgtgtttttgtaggccgggtaaggcgcagccgccacccggcaaacgccgcaatcagtcagcannnnnnnnnnnnnnnnnnnnnnnnnnnnnnnnnnnnnnnnnnnnnnnnnnnnnnnnnnnnnnnnnnnnnnnnnnnnnnnnnnnnnnnnnnnnnnnnnnnnnnnnnnnnnnnnnnnnnnnnnnnnnnnnnnnnnnnnnnnnnnnnnnnnnnnnnnnnnnnnnnnnnnnnnnnnnnnnnnnnnnnnnnnnnnnnnnnnnnnnnnnnnnnnnnnnnnnnnnnnnnnnnnnnnnnnnnnnnnnnnnnnnnnnnnnnnnnnnnnnnnnnnnnnnnnnnnnnnnnnnnnnnnnnnnnnnnnnnnnnnnnnnnnnnnnnnnnnnnnnnnnnnnnnnnnnnnnnnnnnnnnnnnnnnnnnnnnnnnnnnnnnnnnnnnnnnnnnnnnnnnnnnnnnnnnnnnnnnnnnnnnnnnnnnnnnnnnnnnnnnnnnnnnnnnnnnnnnnnnnnnnnnnnnnnnnnnnnnnnnnnnnnnnnnnnnnnnnnnnnnnnnnnnnnnnnnnnnnnnnnnnnnnnnnnnnnnnnnnnnnnnnnnnnnnnnnnnnnnnnnnnnnnnnnnnnnnnnnnnnnnnnnnnnnnnnnnnnnnnnnnnnnnnnnnnnnnnnnnnnnnnnnnnnnnnnnnnnnnnnnnnnnnnnnnnnnnnnnnnnnnnnnnnnnnnnnnnnnnnnnnnnnnnnnnnnnnnnnnnnnnnnnnnnnnnnnnnnnattgtcgttccgactgtggcgcgtgctgtaccgcaccgtccatctcaagccccattccaggcatgccggagggcaagcctgccaatacccgctgcgttcagctctctagacactaacctgtgcatgatctttggctcgcccctgcgcccgaaggtgtgctccgggctccagccaaccgccgaaatgtgcggcagtacgcgccagcaggccatcacttatctgcttgagctggaagcgctcaccgcgccttagacatctttgattcgcgtcaggcagctcagcgtcaggacgcacatcaccagcgcaatccagaacaccgtatgatagttccagatttcagccacaacgcccgccagtgagcctgcaataatccagcccacgcgggtggtattagtataaagggtggtggcagagcctgcctgacccggcatcagatcctggaagtagagcatgccgataccggccaggataccgatgtaaatggcgttcagcagctgtaaagcaagaagcagggctggcgtatgaaccgtcagcataccgacataaaacagcagcccggctacggcggcgacgcgcatcaaaaagcgcttgccgaagcgcttcgcgtaatagcccgcaatcagcatggtggggatctcaagccccgcggcggttcccatcatgatcccggccagcttctccggcagatgcagctcatcaataataaacagcggcatattaatgatatagaggctgttggtgccccacatcagcgtacagataatgaataacagcagcgcgtcgcgccggttacgtcgcggagcttccagcgtaccggtcgccactttcggctctttgcgcatggagggcaggaagaaccagaccattgcgccgcatactacgaaggccacggctgcgctgaggtacatcaccgtaaagccaaaacccatcgccagcgcgtaggcgagcggggggccaatcacccacgccagcgacacctgcgcgcgcagtatcgagctgaacatcaccgcttcccgcccggtgcggtcggcatgctcacgggcaagggcgaacatctgcgggttggcggtcgagccgaaactgctcaggaatacgcccacaaacagcagaatgaagtagttacggttccaggcaaacagcaggcaggcaaacaccccgagcaggcagcaaaaaacgatcaggcttttgcgatcgcctttgcggtctgaacgcccggcaagaaactggctgacgaaaatgccgatgatggcgctcccggtgaagaagaagccaaccatcgccgggcgggcgtggacttcgttggtcagaaacaggctcagcgtaggcgtttgtaacgcaccggcaataccggtgagaaaagcaacgatcaaaaacgccgttgacgtcaaatcaaaaggctttggtgaggcggcagcgggggtgttatgcatgttcagtctttgcgagtaacagagagaggcggagtttacgccgcctgtcattaaataaacagagggcaaaatcaagattgccacaataaatcaaaatagcatttcagtttatcgccgtttcgctgaagcgtgctgaacctatttgctgaacatcagcaaaaacctcccgactgaagaagaaatgtgctgcacttctaaattctgcaacaagaaatgtaacttttcttgcaaccttttgtagaaaagacaagacttcttgaaacgtttcagcgctatcttgcatgtcctgacgaagcaggttagcgcttattttctcagttaagctgaaacgattcaatttcagcaggagaggagaatcatgttccagttatctgttcaggatattcacccgggcgaacaggccgggaataaagaagaggctattcgccaggtcgccgctgcactcgtgcaggctggcaacgtggctgacggctacgtcaacggcatgctggcgcgtgaacagcagacctccaccttcctcggtaacggtattgcaattccgcacggcaccacggacacccgcgatcaggtgctgaaaaccggcgtacaggtcttccagttcccgcagggcgtgctgtggggcgagggtcaggtggcttacgtggcgattggcatcgcggccagcggtgacgaacacctgggcctgctgcgtcagctgacgcacgtgctgagtgatgatgccgtcgcggaacagcttaaatccgccaccactgctgaagagctgcgtgccctgctgatgggcgaaaaacagagcgaagcgctgaagctggataatgaaaccctgacgctggacgtcgttgcgtccgatttgctgacgctccaggcgctgaacgcggcccgcctgaaagaagtgggagcggcagataccacttttgtgacgtgcgccatcaatgataagccattaaacctgggtcagggcatctggctgaacgacagtgctgaaggcaacctgcgtagcgctatcgcggtcagccgtgctgcggttgcctttgagacagacggcgaacgcgccgcgatgttggtaacggtcgccatggcggacgatcagccggtatccgtgctgaagcgtctgggcgatctgctgctgaacaataaagctgaaaaactgctgaacgcagacgcggcgacggtgctggccctgctgaccagcgacgatgcgctgacggatgacctgctgagcgcagagtacgtggtgcgtaacgaacacggcctgcatgcccgtccgggcaccatgctggtgaataccattaaacaatttgaaagtgagatcaccgtgaccaatctggacggttcgggtaaaccagccaacgggcgcagcctgatgaaagttgtcgcgctgggcgtgaagaaaggccatcgtctgcgctttaccgcgcagggtgcggatgctgaacaggcgctgaaagcgattggcgacgccatcgcggccggtctgggggagggcgcataatgagcagacgtgttgcgaccattacgctgaacccggcttacgatctggtgggtttctgcccggaaattgagcgtggcgaagtcaacctggtgcggacgaccggcctgcatgccgcaggaaaagggattaacgtggcgaaggtgctgaaagatctcggcatcgacgtcaccgtaggcggcttcctcggtaaagacaaccaggatggttttcagcagttgttcagtgaactgggcatcgctaaccgttttcaggttgtgcagggccgtacccgcatcaacgttaagctgaccgagaaagacggtgaagtgaccgatctgaacttctccggcttcgaagtgaccccggctgactgggagcgctttgttgccgattccctgagctggctgggccagtttgacatggtgtgcgtcagcggcagtctgccgtccggcgtcagcccggaagcgttcaccgactggatgacgcgcctgcgcagccagtgcccgtgcattattttcgacagcagccgcgacgcgctggtcgccggtctgaaagcctcgccatggctggttaaacctaaccgccgcgaactggagatctgggcgggccgtaagctgccagaattaaaggatgtgattgacgctgcccatgcgctgcgcgagcagggtatcgctcacgtggtgatttcgctgggtgcagaaggtgccctgtgggttaacgcctccggggaatggattgccaaaccgccttcaatggaggtggtcagcaccgtgggtgccggggattcgatggttggcggcctgatctacggtctgctgatgcgcgaatccagtgaacataccttacgtcttgctaccgccgttgcggccctggccgtgagccagagcaatgtcggtattaccgatcgtacccagttagccgcgatgatggcgcgcgttgacttaaaaccttttaactaacagcaggagaggaataatgaaaacgctgctgatcattgactccggtctcggacaggctcgtgcctatatggcgaagaccctgctgggcgcggcggcacaaaaagcgcatctggatatcattgataacccgggtgatgctgaaatggcgattgttctgggcgacaaaatccccgctgacagcgccctgaacggcaaaaaagtgtggctgggtgatattaatcgcgcggtggcacaccctgaactgtttctgagcgaagcaaaaggtcatgcgacggtttacagcgcacctgttgaggcggcgccggttgccgccgctgggccgaaacgcattgttgcggtaacggcctgcccgacaggtgtggcgcacacctttatggcggctgaagccattgaaaccgaagcgaaaaaacgtggctggtgggtgaaggttgaaacccgcggctctgttggtgcgggcaatgccatcacgccggaagaggtggcggaagccgatctggtgattgtggcggcggatatcgaagtggatctggcgaagtttgccggcaagccgatgtaccgtacctctaccggcctggcgctgaagaagaccgcgcaggagtttgataaggcgctggcagaagccaaaccgtatcaggcaaccggtgcggctaaaactgcgaccgaagggaaaaaagagtctgcgggcgcgtatcgtcacctgctgaccggcgtgtcctacatgctgccgatggtggtggcgggcggcctgtgtattgcgctctccttcgcctttggtatcgaggcgtttaaagagccgggcacactggcggccgcgttgatgcagattggcggcggctccgcgtttgcgttgatggtgccggtgctggcgggctttatcgccttctccattgctgaccgtccgggtctgacgccgggtcttatcggcggtatgctcgccgtgagtaccggttctggttttatcggcggtatcattgccggtttcctcgccggttatgtggcgaagctgatcagctcgaagctgaagctaccgcagagtatggaggcgctgaaacctattctgatcatcccgctgatttccagcctggtggtcggtctggcgatgatttacctgattggtaagccggtcgcgggcattctggaaggtctgacccactggctgcaaaccatggggacggcgaacgcggtgctgctgggcgcaatcctcggcggtatgatgtgtaccgacatgggtggtccggtgaacaaagcggcatatgcgtttggcgttggcctgctgagtacccaaacctacgcgccgatggcggcgatcatggcggccggtatggtgcctccgctggcgctcggtctggcgacgattattgcccgccgtaagttcgataaagcgcagcaggaaggcggtaaagcggcgctggtgctgggcctgtgcttcatcaccgaaggcgcaatcccgtttgcggcacgcgatccaatgcgtgttctgccgtgctgtatcgtgggtggtgcggtgacgggggctatctccatggcggtaggtgcgaaactgatggcgccgcacggcggtctgttcgtcctgctcatccctggcgccatcacgccggtgctggggtatctgctggcgattgttgccggtacgctggtggcaggcctgtcttacgcggtgctgaagcgcccggaagcggaagtggtcgcaaaagcagcctaaaagaggtgtcgggtggcggcttcgccttacccgacctacaaaaaagccgggtgcgtaagcacgcccggctttttttatgccgcctgttcagcggtttgctgcgccttcagccaggcaatctcttccgcccagatatccgggttaatggtttcgagcaccatcggaatgccgtcgaagcgggcgtcctgcatgataaagcggaacgcatcatggccgatgttgccttcgcccaggctgtggtggcggtcaacgcggctgccgaacgcgcttttcgcatcgtttaagtgcataccgcgaagatatttaaaaccgacaatnnnnnnnnnnnnnnnnnnnnnnnnnnnnnnnnnnnnnnnnnnnnnnnnnnnnnnnnnnnnnnnnnnnnnnnnnnnnnnnnnnnnnnnnnnnnnnnnnnnnnnnnnnnnnnnnnnnnnnnnnnnnnnnnnnnnnnnnnnnnnnnnnnnnnnnnnnnnnnnnnnnnnnnnnnnnnnnnnnnnnnnnnnnnnnnnnnnnnnnnnnnnnnnnnnnnnnnnnnnnnnnnnnnnnnnnnnnnnnnnnnnnnnnnnnnnnnnnnnnnnnnnnnnnnnnnnnnnnnnnnnnnnnnnnnnnnnnnnnnnnnnnnnnnnnnnnnnnnnnnnnnnnnnnnnnnnnnnnnnnnnnnnnnnnnnnnnnnnnnnnnnnnnnnnnnnnnnnnnnnnnnnnnnnnnnnnnnnnnnnnnnnnnnnnnnnnnnnnnnnnnnnnnnnnnnnnnnnnnnnnnnnnnnnnnnnnnnnnnnnnnnnnnnnnnnnnactcctcgaaggtatttttcgtggcctcggttgtgcgcaggtcatagccggcggcaaaggcgtgacaggtatcgatgcacacccccacgcgggatttatcttccacgccgtcgatgatcgccgccagatgctcaaacttaaagccgaggttgctgccctgaccggcggtattctcaatcaccgccgtcacgccctgggttttatccagcgtcatgttgatggactcggcgatgcgcgccagacaggcgtcttcgtcaatctgcatcagatggctgccgggatggaagttcagcagcgtcagccccagctgttcacagcgctgaacctcatccaggaacgcttcgcgggatttttccagcgcctcggcaaccgggtgaccgaggttaatgaggtagctgtcatggggaaggatttggccaggcccgtagccgtatttctcacaggcggctttgaaatcatcaatcacttcagcggtgagcgctgcggcgcgccactggcgctggtttttggtgaacagggcgaaagcggtcgcctcgatttcggcggcgcgaatggcggcattcgcaaggccaccggcagcgctgacgtgcgctccaacatatttcataaaaagactcctgttaacccgaaatgcctatgatagcgggttaacaggagaaggacgagatggtttatgccaacaggctgtgcacggcgaggttaatcgcaccaccgccaacgattagccagatgaacagcaccagcgccatcagcagcggtttcgcgccggcttttttcagcgcgctgacgtgtgtggtgacgcccagcgccgccatcgccatcgccagcaggaccgtatccagcgtcaccagcatatccaccatcgcttttggcagcaggtggaaagagttgaagacagcgaccacgatgaacaggatcgcaaaccacggaatggtgattttgcttttctcgctgccgcctgccggagcaagctgtttaacccgcgccgcgaggaaaatcaggaacggggccagcatcatcacgcgcagcattttggcgatgaccgccgcgttttccgcttccgggttaatggcgtgacctgccgccaccacctgcgccacttcgtgcatggttgagccgatataaatgccgtaggtttccggactaaaccagtgcgccaccagcggatacatggccggatacaggaagatcgccagcgtaccgaagataactaccgttgcgacggcaaccgtgactttactggcttcggctttaacgacgggttctgttgccagtaccgccgccgcgccgcagatgctgctacccgcaccgatcagccagctggtctgtttgtccagcccaaagatcttctggccgataaagcacgccagtaaaaaggtgctcgaaagggtcaggacgtcaatggcaatcccgctgacaccgacatccgcaatctgcgaaaaggtgagacggaagccataaaggatgatcccgagacgtaataaatgctgcttggcgaaaagcacgccgccgtcgcaggatttccagatgtgtggataaacggtgttcccgaccaccatgccgagcagaatggccagcgtcagggcgctgaaccctgcgccggcaaccgctggtatactcccgccccataaagccacgccggtcaccacggcgctgagcgcgaggcccggcatgaagtgccacactgtacgatgatgttgtaaggtgatttctgacataaccttctcctttgtctggctaaaggttacggcgctctggcttaaaaataaaattgattatatatttataatcaatctttataagtggtaagcaaccatgcacattacattgcgtcagctggaagtttttgccgaggtgctgaaaagcggctcgacaacccaggcgtcacaaatgctggcgctctcgcagtccgccgttagcgcggccttgaccgatcttgaagggcaactgggcgttcagcttttcgacagggtaggaaagcggctggtggtgaacgaacatggccgcctgctgtacccgcgtgccctggccttgctggagcaggcaacggagatcgaacagctgttccgcgaggacaacggcgctattcgcgtctacgccagcagcacgatcggtaactacatcctgccggaagtgattgcccgctaccgccgggattttccgaccctgccgctggaaatgagcgtcggcaacagccaggacgtgatcaacgcggtgatcgatttccgcgtggacatcgggcttatcgaagggccgtgccacaacgtggatatcattgcggaaccctggctggaggatgagctggtggtgtttgcctccccggcctcatctttactccagggcgaggtgacgctggagcgtctggcgcaggcgcagtggatcctgcgagagcagggctctggcacgcgtgagattgtcgattatctgctgctgtcccatctgccgcagttccagttagggatggagttaggtaactccgaggcgattaagcatgcggtgcgtcatggcctgggcattagctgtctttcccgacgggtgattgccgaacagctggaaaccggctctctggttgagatccccgttccgctgccgaagctggtgcgcacgctgtggtgcatccatcatcgtcagaaacacctttccagctcgctccagcgttttctgcgttactgcgagatgtaaaagctcccctcaccctggccctctccccaaaggggagagggaaaaattatgctttacttataatcctggccgagtcatgaagctctcttataactgagcatttctgccggaagcaacgcagatcgtctgctacaatcgcgcctcatttattgaatggacagcattttcacatggtttcagaaactaaaaccacacaagcgcccgcgctacgtcgcgcacttaaggcgcgtcacctgacgatgatcgccattggcggctccatcggtacgggactttttgttgcctctggcgcaacgatttcggcagccggcccgggtggggcattattctcttatatcctgattggcctgatggtctacttcctgatgaccagcctgggcgaactggcggcatacatgccggtgtctggttcgttttcgacctacggacaaaaatacgttgaggaaggctttggcttcgcgctgggctggaactactggtataactgggcggtgaccatcgccgttgacctcgtcgcggcacagctggtgatgacctggtggttcccggacacgccgggctggatctggagcgccctgttcctggcggtcatcttcctgctgaactacatttccgtgcgcggtttcggcgaagcggaatactggttctctttgattaaagtggcaaccgtcatcatctttatcgtcgtcggtgtggcgatgatcgttggtattttcaaaggggctgaaccggcgggctggagtaactggactataggcgatgcgccgtttgccgggggcttctccgcgatgattggcgtggcgatgattgtcggcttctccttccagggcacggagctgattggtattgcggccggtgaatccgaaaacccggagaagaacattccgcgcgcggtgcgtcaggtgttctggcgtatcctgctgttctatgtgttcgcgatcctgattatcagcctgatcattccgtataccgacccaagcctgctgcgtaacgacgtaaaagacatcagcgtcagcccgttcacgctggtcttccagcacgcgggtctgctctctgcggcggcggtgatgaacgcggtgatcctgacggcggtactgtctgcgggtaactccgggatgtacgcctcaactcgtatgctctacaccctggcctgcgatggtaaagcgccgcgtattttctcgaaactgtctcgcggtggcgtgccacgcaacgcgctgtatgcgaccacggtgattgcgggtctctgtttcctgacctccatgttcggcaaccagacggtctacctgtggctgcttaacacctccgggatgacgggcttcattgcctggctgggcattgccatcagccactaccgtttccgtcgcgggtacgtcaagcagggtcatgatctgaataatctgccgtaccggtcagggttcttcccgctggggccgatcttcgccttcgttctgtgcctgatcattaccctgggtcagaactatgaggccttccttgcggacaccattgactggggcgccgtcacggccacctatattggcattccgctgttcctgatcatctggtttggctacaaactgacgaaaggaacacgcttcgttcgctacagtgaaatggatttcccggaacgatttaaacaataaccgcacttcctctcttttagcccgctcagttgagcgggcttttttatgggcagatcagaagctgtaggtcatgccgacggtgtagcgacggccatccagcacggtgtcatacgtatcgtaatcaatctgcttatcgagcacgttatacacaccggcagtaaccagcaggtttttgttggcgttgtagcgcataccgacatcaacctgagtgtaggacggcgtaccctgggacattgacgtgcggctcaggtactcagacgttttaccgcgcaggttcagacggctccagaatccgacatctggcgtcgcctgccagtccagggtggtgttgaacatgtgtttcggcattttgttcagtggcttgccggagaactggccgctcttctgctcagactccgtataggtgtagtttgcagtccagttcacatcgcgcgtgattttccacccgaaggaggactccacaccgcgcatgttggctttgtccacgttgacgcgatcgctgacgaaatcatagctgtgatcgccaatcgtacaggcgggatcggcgctgctgttacagcggcgaacttccgtaatcttgtccttgaagtcggtattaaacagcgttacgccggcattcaggttatcgttgttatcccagagcagggcgagctcttcgctcagactcttctctggtttcagatccgggttgccaacgatgataccgtcaagacggccgccaccagttacctggccccagctggcagacgactgacgcagatccggcgcacgatagccagccgaaaccccgccttttaacgtccactgatcggccaggtgccatacgccgtaaccgcgcggcgtccagttagtaccgtagttttggtctttgtccatacgcaggccgccggtcaacgtaaagctttccgtcattgcccattcatcttcggcaaacagggcccagctccagcgcgtcagtttgttcaggccgtcagcagcttccagctgattacccttgtcgcgcagtttctcataacgatactgcccgccgagggtcaacgtatgatcgccgaggaaaatctggttctggttgttgaaggtggtgttataggagcgcattttgcgacctggattattggtctcttcctgctggatatagctggtggtattgaagtcgtcgtaatacccgctgtgcgttaaggagtaggtcgtgtgctcatagcgcgagtcgcttttggtatttggcgtacaggttgttccccggcaggtttcagccgctttcgacatccccggggtgctgtttctgtcctgaagctcgcgagcaaagtcgaggtcgaaatcgttcttctcgtccggcgtgaagttcagcgtaatgccaccgttacgcattttctgctcgttatagccgttcacgattttatcttctgcgcggcgtgacaacagccccgtcacttttgcgcccagcagtccgtcgatcaggggaccagaagcgtaggcgttggtctggaagatatcgccggaatcattgttttcctggaaggtcgcatcgccatgcaacgaaccggtccaggctttagtgttcgagacttttttggtaatgacgttaattacgccacccatagcatcggagccgtaaagcgaggacatcgggccgcggatgacctcgatgcgctcaatggactccagcggcggcagccagccttgttcaatacccgagttgtcgctgttggggcgggtgcttcgcgtactgacgcgtttgccgttcaccaggaacagggtgtactgagaggccatgccgcgaatactgatatcactgctgctcccgccgccagtgacgacaacgcccgggacgtctctcagggcatcggtaacatcacggtaggctttatcttcaatctgctgttttgaaatcacagagatggaggcgggggcattctggatcttttgttcaaaacccgtcgcggtgacgacaacggtgtcctgatcggctgcgtgaacgaagggggaacatgtggcagcgccaatggcgacggccaggagcttaatgcgcggtattgtcatttgtacattccgtataaaaatgaataaaactccatcgggataaccctgagaactgtatgtttttgtcttgtaagaactctttgagatggagaagagcctggaattgtacaaaagaatgtagaattgtaaacacaaatgataattgaaatcatttgtgtttgggtgtcggcgacagaaatcaggctggattcaagcggatagaagtatgtaaagagggggaggggaagacccggtaggcaggaggcgctaccgggcaaaaggcggaacttatctgaacagatgctccgcatggaagcggagatgatcctcaataaaggacgccatgaagtaatagctgtggtcgtatcccggctgaatgcgcagcgttagcggccagtccttctggcgcgcggcttccgccagcaccgcaggctgtagttgtccggcgaggaactgatccgcatcgccctgatcgataagcattgggatcgcattcaccgaatcgctcgccagcatcaacgcgcagctgtcccattcctgccatttttctgcatcttcacccagatagtgcgtaaaggctttttgcccccacggcacctgcgttgggttcacaatcggcgcaaatgcggacacgctggtgtatttccccggatttttcagcgccattatcagcgccccgtggccccccatcgaatgtccgcttatcgcgcagcgctcgctgaccgcgaactgagagtgcaccagggcaggcagttcatcgcgaatgtagtcatacatgcggtaatggctcgcccacggttgttccgtggcgttgagatagaacccggcgcctttacccaaatcgtatccggcatcgtcggccacgtcatcgccacgcgggctggtatctggcatcaccagcgcaatgcccagttcggcggcaatacgctgggcacccgctttggtggtgaagttttcgtcgttgcaggtcaggcctgaaagccagtacagcaccggtggattgtccgcagggggcaggaaaatgctgaacgtcatagcacaattcagcgtggtggagtcgtgccgccagcgctgctgtcgaccttcaaaacaacgatgctcttcgagcagttccatgcagggctccttaaaggtaagacgattcataaaacgcataatacagagttttcattgacctgtgagcaactttcactttcgcaggacggcgagatgttgcatcataaatttacttttctttaacaattggagcgatcatggcgctgcgtatcgcgctcagcggatttgtggttctggtcgtggcgatggggatagggcgcttcgccttcacgcctcaggtgccgctgatgatagccgccgggcaactcacgcttaccagcgcggggctggtggcggcaatgaactatctgggctatctggtgggggcatgggatgccatgcgcgcccatcgcttcgttgaaacgcgtctctggcttggcatcaccggtgcggtggcgctaacgctgctctccgcggcggcagataatgccgttgttcacggtctgctgcgctttgtgatcggctgcatgagcggctggtcgatggtgctgattgccgcctggaccaacgagcggctggggcagctgggcaaaccgggactcagtgcggccgtctttgccggacccggggccggcatcnnnnnnnnnnnnnnnnnnnnnnnnnnnnnnnnnnnnnnnnnnnnnnnnnnnnnnnnnnnnnnnnnnnnnnnnnnnnnnnnnnnnnnnnnnnnnnnnnnnnnnnnnnnnnnnnnnnnnnnnnnnnnnnnnnnnnnnnnnnnnnnnnnnnnnnnnnnnnnnnnnnnnnnnnnnnnnnnnnnnnnnnnnnnnnnnnnnnnnnnnnnnnagcggcctgctggcggtctatattcaggcgaaatccttgtccgccggggcggcatggcaaatctacggcgtactggcgctggtgctgattgtgctggtggcgcgctacctgccgcggtccgggcagctccatcggcccggtaccgcgcctgaaccgctgctgctgaccgcagatctcaagcgtctggtctggagctacagcctggcagggttcggctatatcctcccggcgacctttttatcgcaaatggcggcggtgcgttttcccggcagcctgtttgcccagtttgtctggccgatatttggcgccgcctcggtggtgggaattgcgctcagcattgccctgcggcatacatcaagcgctaaccgcaggctggcgattgttctgtggttacaggggattggcgtgctggcggcctggctgctgccgggcataggcggcttgctgacgggtgggctgctggtgggcggcgggttcctctgcgccgtgcagctctctcttttgtacggtcgcgagctggcgccagaccacacgcgttatatggcgggactgctcaccaccgggtatgccattggtcagctggtgggtccggtcacgtcggcactgtcgacctggctcacgcatcggctggaacctgcgctggggctggcggggatcgcgctgttcgttggcggagcgttagtctggaaccgtcaggctgaaaggcaacagcaattgcaataattatcgtcgtgaatactggattatgtgcgtcgcctcacgcacaatgagcgcacacttttgccacaacgagggcaaaagacgccacacctgcaggagaaaagaatgtcatcactcagtaaagaagcagcccttgtccatgaagcgctggttgcgcgcggtcttgaaacgccactgcgcccgcccgtgcaggagctggacaatgatacccgcaagagtctgatcgccggccatatgacggagatcatgcaactgctgaatctcgatctgagcgacgacagcctgatggagacgccgcaccgcatcgcgaagatgtacgtcgacgaaattttctccggcctggattacgcgaacttcccgaaaatcaccgtcattgaaaataagatgaaggtcgatgagatggtgacggtacgcgatatcacgctgaccagcacctgcgagcatcactttgtgaccatcgatggtaaagcgacggtggcctatattccaaaagatacggtcattggcctgtccaagatcaaccgcatcgtgcagttctttgcccagcgtccgcaggtgcaggagcgtctgacgcagcagatcctgaccgcactgcaaactctgttgggtactaacaacgtggcagtgtctatcgacgcggtgcactactgcgtgaaagcgcgcggcgtgcgtgatgcaaccagcgcaaccaccaccacttcgctgggtggcctgttcaaatcgagccagaacacccgccaggagttcctgcgcgccgtgcgtcaccacaactaatcagacagggcagggaccatggagcgaaacgtcacgctcgattttgttcgcggcgtcgccattctcggtatcctgctgctgaatatcagcgccttcggtctgccgaaggccgcttatctgaatcctgcgtggtatggcgacatcacgcgcagcgacgcctggacgtgggcaatcctcgatctctttgcacaggttaaattcctgaccctctttgcgcttctgtttggcgcgggacttcagcttctcctcaaacgcggtacgcgctggatccagtcgcgtttaacgctgctggttatcctcggttttattcacgggctgctgttctgggacggcgatattctgctcgcgtatggtctggtggggctgatttgctggcggctgatccgcgacgcgcccggtgtgaaaagcctgtttaataccggcgtgatgctctatgtcatgggactggccgtgttattgctgcttggcatgattgccgatgcttccaccagtcgttcatggatcccggatgcggccaacctgcaatatgagcagttctggaagctgaaaggcggcatggaagcgataggcaaccgggccgatatgctcggcgataacctgctggcgctgggcgcgcaatacggctggcaactggcggggatgatgctgatgggcgcagccctgatgcgcaccggctggctgaaaggggaatttagcctgcgacactatcgtcgtacgggagcagggctggtgctgctcggcgtgatcatcaacctcccggcggtgatgatgcagtggcatcttcagtgggattaccgctggtgtgcattcctgttgcaggtgccgcgcgaactgagcgcgccgttccagactattggctatgcggcgctgatctacggcttctggccccagctttcccgcctgtggatcgtcagtgcggtggcctgcgttgggcggatggcgttaagcaattacatcctgcaaacgctgatatgcaccacgcttttctaccgattcggcctgtttatgaaattcgaccgcctgacgctgctggcgtttgttattccggtctggattgttaacgtggtgttttcggttgtctggctgcgttttttccgccagggcccgctggaatgggcatggcgacggttaaccgcccgtgcttcgggcgtgtcattgcgtaatacatccagataacgatctggatcacaatcattaacaaaacggatgtaagcgttttcatctgtgtgagcttcttcacgtagtctcctctctctcgctgccagaatagccaccttgctaaacacagggggtgtctgtgagttgctgcaatcctttaaagggtggtgaatatgatcaccattcgtgacgtcgcccgccaggcgggtgtttctgttgctactgtctcccgcgtgctgaacaacagtgcgctggtcagccctgaaacgcgtgaaaccgtaatgaaagccgtgacccagctggggtaccggccaaacgctaatgcccaggcgctggcgacgcaggtcagcgataccattggcgtagtggtgatggacgtgtcggacgccttcttcggcgcgctggtcaaagcggtggacgtcgttgcccagcagcaccagaaatatgtgctgattggcaacagctatcacgaggctgaaaaagagcgttatgccattgaggtactgatccgccagcgctgtaacgccctgattgtgcactctaaagccctgagcgatgaagagctggccgggtttatggagcagatccccggcatggtgctgatcaaccgtatcgtccccggctacgcgcaccgctgcgtcggtctggaaaacatcagcggcgcgatgatggcgacgcggatgctcatcagcaacggccatcagcgcattggttatctggcctccagccacggtattgaagacgacatgatgcgccgcgagggctggcaaaacgccctgaaagagcagggcattgcgccgctggaaagctgggtaggtaccggttcgccggacatgcagggcggtgaagcggcaatggtggaactgctggggcataatcttcagctgacggccgtgtttgcctataacgacagcatggcggcaggtgcgcttaccgcgctgaaagacaacggcattgcggtgccgcagcatttatcgctgatcggctttgacgatatcccgattgcccgttacaccgatccgcagctgacaacggtgcgttaccccattgcgtcgatggcgaaactggcgacagagctggcgttacagggggcggcagggctgttagatcctaacgcaacgcattgttttatgccgactttagtacgccgccattcggtcgctatccgacaaactgtggctccgatcactaactgataacatcacgtgatgtaaccgttttcaatctgtgagtaaattcacagtatcttaacaagccgctgtctatgatgtcagcgttttaggggctgaaacacaatgtaacggtgattattcacttttaccgttaccagcatgcctcaaacaacgaataaaacgcattcctggagcgttaccgaacacggaagctggacattttataagtgaacttcggcgatcagtaacgttttattaacatctgcccgccgaccgtttttcacaagaactaccctgcataaaaaaaaccggagataccatgaataagaaggtgttgactctgtctgctgtcatgacaagcatgctttttggcgcagcagcgcacgcagcggatacccgtattggcgtgactatctataaatacgacgacaacttcatgtccgttgtgcgtaaagcaattgaaaaagatgctaaatcagcgcaagacgtgcagctgctgatgaatgactcccagaatgaccagtccaaacagaacgatcagattgacgttcttctggcaaaaggcgtgaaagcgctggctattaacctggttgacccggctgcggcaggcacggtgatcgagaaagcgcgcggccagaacgtgccaattgtcttcttcaacaaagaaccttcccgtaaggcgctggacagctacgataaagcgtattacgtgggtaccgactccaaagagtccgggattatccagggcgatctgattgcgaaacactgggcggcgaacccgaactgggatctgaacaaagatggtcagattcagttcgttctgctgaaaggcgaaccgggccatccggatgctgaagcacgtaccacctacgttattaaagagctgaacgacaagggcctgaaaacccagcagctggcgttagacaccgcaatgtgggacaccgctcaggcgaaagataagatggacgcgtggctctctggtccgaacgccaacaaaattgaagtggtcatcgccaacaacgatgcgatggcaatgggtgcggttgaagcgctgaaagcccacaacaaatccgccattcctgtattcggtgtggatgccctgccagaagcgctggcgctggtgaaatctggcgctatggccggtaccgtgctgaacgatgccaacaaccaggcgaaagccaccttcgatctggcgaaaaacctggccgacggtaaaggcgccgctgacgggactaactggaaaattgacaacaaaatcgttcgcgttccttacgtgggcgtagaccagtccaacctggctgagtttatcggtaaataagttatctgcattgtcttcactgggcgcaattcgttgcgcccttttataacgcgatatgcgaggccaacaaggtataattatggtcagcacaactactcagtcgtccggtgaatacttgttggaaatgaccggtgtcaacaagtcattccccggtgttaaggcgctcgataatgttaatttaaaagttcgtccacactctattcatgcgttaatgggtgaaaacggtgcgggtaaatcaacattattaaaatgcctctttgggatctatcaaaaagattctggcagcattctttttcagggaaaagagatcgacttccattcagcgaaagaagcgctggagaacggtatctcgatggtacaccaggaattaaacctggttctgcaacgttcagttatggataatatgtggttgggtcgttatccaaccaaaggtgtctttgtcgatcaggataaaatgtatcgcgacaccaaagccatttttgatgagctggatattgatatcgacccgcgcgcacgcgtcgggacattatccgtttcccagatgcagatgatcgaaattgccaaagcgttctcctatgatgcgaaaatcgtgatcatggatgaaccgacatcgtcattaacggaaaaagaggttaaccacctttttaccattattcgtaagctgaaagatcgcggctgcggcattgtctatatctcacataaaatggaagagatcttccagctatgcgatgaaatcaccatcctgcgcgacggccagtggatcgccacccagccgctggaagggctggatatggacaagatcatcgccatgatggttggccgttctctgaaccagcgcttcccggataaagaaaacaagccaggcgaagtgattctggaggtgcgtaacctgacctcgctgcgtcagccgtctatccgcgatatctctttcgatctgcacaagggggagatccttggcatcgcagggctggtgggcgccaagcgcaccgatatcgtggaaaccctgtttggtatccgtgagaaagccgaaggcaccattacgctgcacggtaagaagatcaacaaccacaacgccaacgaagccattaataatggctttgcgctggtgacggaagagcgtcgttccaccggtatttatgcttatctggatattaactttaactcgttaatttctaatattcgcaattacaaaaataaagtcgggctgctggataattcccgtatgaagagcgatacccagtgggtgattgactccatgcgcgtgaaaacgccgggccaccgcacgcaaattggctcactctcgggagggaaccagcagaaagtcattattggtcgctggctattaacccagcctgaaattctgatgctggatgaacctacgcgcggtatcgacgttggtgcaaaatttgagatttaccagctgatcgccgagctggcgaaaaaagataaagggatcattattatttcttccgaaatgccggaattgttagggatcacagaccgtattctggttatgagcaatggtctcgttgccggtattgttgaaaccaaaacgacaacgcaaaacgaaattttgcgtcttgcgtctttgcacctttaagatcaggggctcctcatgagtgcgttaaataaaaaaagttttctcacttatctgaaagaaggcggtatttacgttgttcttttagtcttgctggcgattattattttccaggaccctacgttcttaagtctgctgaacttgagtaacattctgacccagtcttccgtacgtattattatcgcgcttggcgtggcgggacttatcgttacccaggggactgacctttcggcagggcgccaggtgggtctggcggcggtcattgcggcaaccctgttgcagtcgatggaaaacgccaacaaggtgttcccggagatggcgaccatgccgattttcgtggtgatcctgatcgtgtgcgccatcggcgcggtaattggcctgattaacggcatcatcattgcttacctgaacgtgacgccattcatcaccacgcttggcacgatgatcatcgtttatggtatcaactccctgtactacgatttcgtcggcgcgtctccaatctctggcttcgacagcggcttctcgaccttcacgcaggggtttgttgcgctgggcagcttccgtctctcctacatcaccttctatgcgctgattgcggtggcgttcgtctggatcctgtggaacaaaacccgtttcggtaaaaacatctttgctatcggcggtaaccctgaagcggcgaaagtgtccggggtcaacgtggctctgaacctgctgatgatttacgccctgtccggggtcttctacgccttcggcgggatgctggaagcgggccgtatcggctctgcaaccaacaacctcggctttatgtacgaactggatgcgattgcagcctgcgtggttggcggcgtctccttcagcggcggcgtggggaccgtgctgggcgtggtgaccggtgtgatcatcttcaccgttatcaactacggcctgacctacatcggcgtgaacccgtactggcagtacatcatcaagggtgccatcatcatcttcgcggttgcgctggattcactgaagtacgcgcgtaagaagtaagatcttcagaatgaaaaggcccgctcacgtagcgggccttttttgcctggtggcgcgacgcttaccgggcctacaaaatcgcgatcgtaggtcgggtaaggcgaagccgccacccgaccaaaagttattacttcttctgtaattnnnnnnnnnnnnnnnnnnnnnnnnnnnnnnnnnnnnnnnnnnnnnnnnnnnnnnnnnnnnnnnnnnnnnnnnnnnnnnnnnnnnnnnnnnnnnnnnnnnnnnnnnnnnnnnnnnnnnnnnnnnnnnnnnnnnnnnnnnnnnnnnnnnnnnnnnnnnnnnnnnnnnnnnnnnnnnnnnnnnnnnnnnnnnnnnnnnnnnnnnnnnnnnnnnnnnnnnnnnnnnnnnnnnnnnnnnnnnnnnnnnnnnnnnnnnnnnnnnnnnnnnnnnnnnnnnnnnnnnnnnnnnnnnnnnnnnnnnnnnnnnnnnnnnnnnnnnnnnnnnnnnnnnnnnnnnnnnnnnnnnnnnnnnnnnnnnnnnnnnnnnnnnnnnnnnnnnnnnnnnnnnnnnnnnnnnnnnnnnnnnnnnnnnnnnnnnnnnnnnnnnnnnnnnnnnnnnnnnnnnnnnnnnnnnnnnnnnnnnnnnnnnnnnnnnnnnnnnnnnnnnnnnnnnnnnnnnnnnnnnnnnnnnnnnnnnnnnnnnnnnnnnnnnnnnnnnnnnnnnnnnnnnnnnnnnnnnnnnnnnnnnnnnnnnnnnnnnnnnnnnnnnnnnnnnnnnnnnnnnnnnnnnnnnnnnnnnnnnnnnnnnnnnnnnnnnnnnnnnnnnnnnnnnnnnnnnnnnnnnnnnnnnnnnnnnnnnnnnnnnnnnnnnnnnnnnnnnnnnnnnnnnnnnnnnnnnnnnnnnnnnnnnnnnnnnnnnnnnnnnnnnnnnnnnnnnnnnnnnnnnnnnnnnnnnnnnnnnnnnnnnnnnnnnnnnnnnnnnnnnnnnnnnnncgttctctgcatagctgccggtgaagatgcggccgtcgcggcactgaagggcgacgccgcttggagatttgctgtagggcgtgtggcttttattggcggcggcaatggccgcttcgctcagctcatctcccgagagcgcataatcgtggtcctgctcgtccatcagcagggttttgatctcaagatctttcgggccgaaagcatccggcaggtaatcacccagcgtatgcggtgcgcgtcccggcaggttgatacgcagttcaagaccgctgttcagctcattcataaactggcggcagtggccgcaaggggtatagttgacggtgatggcgcgcagggctttttcgccgcgcagccaggcgtgactgatggcgctctgctccgcgtggacggtttgctgcatggtcgcaccaagaaactccatgtttccgccgaagtaccaggttccgctcacgccgcgcgcaattgcgcctacgttaaaatgggaaaggtcagcgcgggcgcaggcagccgcaaggggcagcagggcgaaagccagcgcgtcttcgtccagccccgttgcctgtttaagggccgtgacctgatctgccgtcagcagggcggggaaatgcgcatccgccagaaccggagccagggctgattgcaaattctctgcaagctgagagaaagcagcttgaaaacgtggatgcatgacgttgcctcatcaaggttaatggatcggtagtgtacggagccgtacggcctttatatgtgatccaaatctcattatgtgtgcaacttatgaaatgaaaatgaaatttgcgcgacgcatcgcaaattttagcccatgactgccagaataatcgggaagataaacggcgcgaccagggaagtgataatcccgcagatcaccagcgccagcgagctgaatgccccttcctgataatccagttccgcgcagcgtgcggtgcccagcgcgtgcgaggcggtacccatcgccagaccgcgtgccgctttggtccgaattttcatgatattgagcagcgtatgaccaaacaccgcgcccaggataccgacaaaaatcacgcacacggcgctgatggccggaatgcccccgatgctgccgcccacggccatggcaatcggcgtggtgacggatttaggcaggatagaggcggcgatctgcggcgacgcgcccatcaataaggccaccgaggtaccggtgatcatcgcaacaaggctacccacaaagcagatggtaatgatggatttccagcgcgcgcggatctgatgcagttgctcatataaaggaaacgccagcgccaccacggcaggctgcaacaaatcgttgaggatcttgctcccggcgaagtaacgttcataaggaatgccggtgagcagcagaaaaggaataatcaccaccatggcgaccagcagcgggttgagcaacggcattttgaaacgcaccgcaagcttacgcgcagcaaagaacaccaccagggttaacggcagggaccaccagatattcgccatcatttttttgttttctccccgacgaccttgcgttcgccatgcacaatgtgtgaactccagctgacgaccaggaataccaccagcgtactgatggcgcaggagaccacaatcgggccgaactgcgctttaagcacatcgtaatactgcatcaccccaacgccgataggcacaaaaagcagggccatatagcgaatgagaacgaagcaccccggattaacccatttcgcgggcagcacctgtaatgccagcagcacaaacaggatcagcatgccgataatgctgccgggtatcgtaatcggcagcagcgaagcgataaaaatgccggcgtataggcaggcataaatgaggacgaaggcgcgaaggtattgccagatagtattcagtgatttgctcatggtgaaagtccttgctgagacgtattcatcatacaattaaacctgaaaatgtgccacggatcacatcatgaattttgggcataccagacattccgcaatggaacgccgggctttcaacatacatagagagcagctactatagcgcgtcttttttcacaggtactcagaatgcgtgttttactggccccgatggaaggtgtgctcgactctctcgtgcgcgagctgcttaccgaggtgaacgattacgatctctgcgtgacggagttcctgcgcgtggtcgatatgttgctgccagaaaaatcattttatcgtctctgcccggaactgcatcgtcagagccgtaccccgtccggtacgctggtgcgtgtccagctgctcggccagtatcccgagtggctggctgaaaacgccgcccgcgcggtagcgcttggttcgtacggcgtcgatcttaactgcggctgtccgtcaaagctggtcaacggcagcggcgggggggcgacgctacttaaagatccggagctgatttatcgcggcgcaaaggccatgcgtgaggcggtgccatcgcacctgccggtgacggtcaaagtgcgtctgggatgggacagcgacgacaagcagttcgaaattgctgacgcggtgcagcaggcgggcgccaccgagctggtggtgcacgggcgaaccaaagaggatggttataaagccgagcgcattaactggcaggcgattggcgagatccgcaaacggcttacgatcccggtgattgccaacggcgaaatctgggattatgagagcgcgcaggcctgcctcaaagagaccggctgtaatgccgtgatgattggccgcggtgcgctgaacgtgccgaacctcagccgggtggtgaaatataatgagccgcggatgccgtgggcggatgtggtgaaactactgcaaaaatacacgcggctggaaaagcagggcgataccggcttgtatcacgtcgcgcgcattaagcagtggctgagttatttgcgtaaagagtacgacgacgcgctgggattatttcaggagatccgtacgctacagacgtctgcggatattgcccgggtgatccagtcaaaatcctgagcgaagtgtgaagtgtttgcccggcgcggagccgggctacggaatcagaaaatcatcttgaatacgccggttaccaccagcagccctatcagaaatataatcaaaataacccacaataatattttcattcgcctctcctgcgtatgtctgtcgaagtaagtgtagcagtcaattcataattagcatgaatacatgaaattaaatcattgtcttggggaataaatttccggatatgaaaatgtataacaatatgcggattgccacgcgttactaaaaaacggaacgtcagtaagcgtaagttgcgcctttatttttttgagttcatggcgtaatgaaacgttctcttactttatctctgagtgctcctcttgtttttatgctggccgcctgcgcgccggaacatgccacggtgtctccagtaaaaacgcaagccgccgccgcagctgtaaatacccaactgcgtcatgccgactggccaaaaagcgaatggtggaaagactttaacgacccccagctcaacgcgctgatcgacaaagcgctggcggatgcgccggatatgcaaattgcccgtcagcgtattaccctggcggaagcacaggcgaaagccgctgtcgctgctgagggtccacagctggatttttccgcagatgttgaacggcaaaaaatgtcggcagaggggctgatgggtccatttgcgctgaccgatccggcggcggggacaaccggcccctggtacaccaacggcacctttggtctgacggcgggttgggatttggatttatggggtaaaaaccgcgcccaaattgaggcccgcatcggtcaggtgaatgcgcaaaaagcggagctggagcagacccgccagctgctcgccagcagcgtcgcgcggctgtactgggactggcagaccgaggccgcggtgggtgacgtactcgcgcaaatcaaacgggagcaggaaaatatcatcggtgccgatcgtgagctttatcagcacggcattacctcctcggtggaaggcgttgaaacggatattaatgccagcaaaaccgatgagcagctcgctgacgagcacggacaaaatgaaggtcattgaggcgcgtctgaatgcgttgacccataccccttcagtcacgctcgcccggcatgccttacctgacgcagaggcgtcgttgccatcaacgctcggttatgaactgctggctcggcgcccggatttgcaggaggcgcactggtatatcgaagcatccatgagcgaagtggatgccgccagagccgcgttctaccctgacatcaatttgatggcattcttgcagcaggatgcattgcacctgagtgacctgttccgctcatctgcgcagcaaatgggcgtaaccgccgggctgacgctgccaatttttgacagcggtcggttgaatgcgaacctggatatcgcccaggcgcaaaacaacctctccgtggcgaactacaacaaggccgtggtagatgccgtaaaccaggttgcccggacggccagcgaagtggaaacgctgaccgccaaaaatcagcaccagcagcagatcgaaaaagatgcggcgcgcgtcgttgcgctggcacaggcgcgcttcagcgccgggatcattgccggctcccgggtgagtgaagcaaaaattccggcgctcaaagagcgtattaccgggttgatgctgaaaggtcagtacgtggatgccacgctccagctcacctccgcgctgggtggcggatatcatcacggctaacattgcgcattatctatacttacctctttgcagattatcaggaggtgagtatgacgcgagtcgcaattgttaccgcatcggattcaggaattggcaaaacgacggccctgatgctggccgaacgcgggtttgatgtcggagtaacctggcattcagatgagaaaggggcgctggcaacctgccgtgaaattgaaacgcgcgggcagcgtgccgaggccattcatctcgacttaagcaatttgccggaaggcgcaaaggccattgaaaccctgattacgcgtttcgggcggctggatgtgctggttaacaatgccggggcgatgaataaagcgccatttctggacctgtcgtttgacgactggcggcacatattcaccgttgacgtggacggcgcgtttctctgctcgcaaatcgcggcgcgtcagatggtgaagcagggggaaggggggcggatcgtgaatatcacctcggtgcatgaacatacgccattgccggacgccagcgcctatacggcggccaaacatgcgctgggcgggttaacgaagtcgatggcgctggagttggttaaacataagattctggtgaacgccgttgcgcccggagcgatcgccacgccgatgaatgatatggacgacagcgaagtgaaagaaggcgcaatgccggaaatcccgctggcacggccagggcataccaaagaaattgccagcctggtggcgtggctgtgtgacagcgacgccagctacaccaccgggcagtcgtttatcgtcgacggcggttttatgctggcgaatccgcagtttaagcctgcggaataagcattcccctcacccccaaggggagagggtgtatagcgtttggggagaggggtagggtgaggggcagcaggccgaactcactcttcatcccgccgcttttcgcgatgcttgagccacagccgtaccacaatcaccactgcaacaaccaggatcaaccaggcccagtgtttaagatgctgatcgagattatgcagccacggacctattacttcgccacccacgtagccaagcgtggtgaaaatcagcgcccaggcaatcgccccgagaatgttcagcggcaggaagattttcggcggtaagcggctcgcgccaatcagtattggcccgatgatgcgaaagccgtacataaagcgggtaccaatcacaaacagccagggacgtcgctggataagccgctgagcacggcgaattttcttttgatgcttagcaaaacgttgcaaaagcgtcgggccaaagcgcagccccagaaagtagagcagctgatcgccaatcataccgcccaacgcgacggcggcgaccaccagcgagaatttcagcaatccctgatgtgcggccaccccgcccagcagcgtgatggtttcgccttccgcgacgctgccgatcaccagcgcggcgtatccatattgttcaataagaccgttgatatccattacgtaaacgtcatctcccttactgtgcctgcgttaatcatataccccatccatcaaccgcgcggcaatcaacggaaatttcccactgtacataaaataatctaaagcctgcattatacttaagctatcgctgacgggccgacaacaagggggcgttatgaaccatgtctggggacttttctcccatcccgatcgtgaaatgcaggtgatccgtaacgagaacgaaacggtcgcgcatcactatacccaccatgtcctgctgatggcagcggtgccggtggtctgcgcgtttattggtactacgcagataggctggaactttggtgacggcaccgtggttcagctttcctggtttaccggactgtacctggccattctgttttatggcctgatgctggccggggtggcggtgatggggcgggtcatccactggatggcgcgcaactatccgcagcgcccgtcgctggcacactgtatggtcttcgccggatacgtcgcgaccccgctgtttttaagcggtattgtcgcgctctatccactggtctggctgtgcgcgctgatcggtacggttgccctcttttacaccggttatctgctgtatgtaggggtgccaaccttcctcaatatcaataaagaagagggcctgagcttctccagctctacgcttgccatcggcgtactggtccttgaggcgctactggccctgacagttattctttggggttatggataccgtctcttttaagttccctgcattgctggcgtaaatgccagcaatgcagcatctggttatgattctccgctggcgacaacgcacggtgatcgctatgatgccgaagccagcctgtgtttatccgttgacacaggcggtgtacgtcataacgtgcgtgaatcattatcagaagtctcatcatgctgaaatttcgagtgtcactccttagtcttgcgctgctgctgggcgtctccgctaccgcgccagccatcgccaaaacgaccgcagtcgccaccgctgctgcgcaaccccagattgcgtccggcagcgcgatgatcgttgacctgaataccaacaaggtgatctacgccagtcatccggatctggtgcgcccgatcgcttccataaccaaagtcatgaccgcgatggtggtgcttgatgcacgactgccgctggacgaaaagctgaaggtggatatcagccacacgccagagatgaaagggatctactctcgcgtgcgtctgaacagtgaaatcagccgtaaaaatatgctgctgctggcgctgatgtcctctgagaaccgcgcggcggcaagccttgcccaccattatcctggtggttacgacgcgtttatccgcgcgatgaacgccaaagccaaagcgctggggatgaaaaatacccatttcgtagagccaaccggtctgtcgattcataacgtctcgacggcgcgtgatttaaccaagctgctgatcgccagtaagcaatacccgctgatcggtcagctcagtaccacgcgtgaggagatggcgacattctcgaacccggcgtatacgctgccgttccgcaacactaaccatctggtgtatcgcgataactggaatattcagttaaccaagaccggattcactaatgcggcagggcactgcctggtgatgcgcaccgtgtttaacggtaagccagtggcgctggtggtgatggatgccttcggcaaatatacccactttgcggacgccagccgcctgcgcacctggattgaaaccgggaaagtgcagccggtgccggcttcagcgctggcgtataaaaagcagaaagcggaacagatggcgacggcgcagaacgactgagccgcctgtctgtgccgggtggcggcttcgccttacccggcctacggccctaaagcggccccgatacgtaggcccggtaagcgaagcgccaccgggcgaaagcgcctactccggcagcgtccagtcaccatcgttgagtggacgctgcatgatcaacgtatcccgccagtcgcccttcttataccccacgctgcgcagttgaccgacaacctcgaagccatgttttttatgcagccgtaacgatcccgcattattgtttccgtcaccaaccacggcaatcatctgccgccagggtccttgttcacaacgggcgatcagtgcctggagtaaggccgagccaaacccgcgcccggtagtgctggcatccacatagatggattcctcaagggtgtaccggtaggcctggcgtggacgataaaacgtggcgtagcagtagccgacaacaatgccgcgatacagcgcaaccagccacggtaaaccgctgtcggtcacgctcttcatccgctgacgcatctcatcgacggtgggaggaatttcctcgaaggacgcacggccatgaagcacatgccaggcgtatatcgccgagatggcatgcgcatcgtcaggaagggcgtcgcgcacctcgatttcagtttcggggaaaatttctacagccgacatgttctgcccgctccttgtttggaaagccagagaaacgtttctctggcaacaggcagatactctagtacgtttgaggagggcttaacaatctcttaaatttggctataagagttcatcagaggcttgcgtattgtgttcctctgtttcggcactctctttccagtatttcttccgcgttgtcttaccaatgcccgggttcatactgtttgtagggtcatttttgcgataaaactgtttaagcgtctccggcgctttgtacaggtgtcctacgttgtgctcggcaggatattgcgcgccacgctcgtgcagcagcgccagcatctgttctttcagcgcgtgtgcatcaaccccttttttgacgatgtaatcctgatggaagacatagcacataaagtggccgtaatagagcttatgcaccagcttgctgtcgatctccggcggcagatgttcaaaccactcggtatcgttgcgacgcagggcgatatccagcgccagaatatcctccacctcttcggaatgcaccgcctgataacggatggcagcacccgccgcggcgaagcggtgcaggaaggctttgctgccttcttccggcgtacaggcaaagaaatccccgtcggcggttttgaagaattcggtgagccagctctgcgcttcggcaatgccgtccccggccattttcagcagcagatggtgctcatacttgtcgcgccaggtcttcatccgctccggtaaatgcgccgggaagacgttgcccagcttctgcataaagcggtcggtgaagtgcggtttgaacaacgatactttctccagcatcgcgtcggtgcggcccttcatagtgaagaagaacggcattttgtcggtgccgagcttgtcgatcatcaggaaggtatctttgccgtagcgctcggcgatgtcgtaaatgtcccggtgcatatactcgcccgccaccggcaggtgagtgaactcggccagaatatgacgacggatctccgtcagcacctccggctgattggtgccgatgtaaaacacctgctgctttttctctgccgggaaggtatcgaggcgcaccgcaaaaacggccagcttgcccgcgcagccggaggattcaaacaggcgatccggatcggcgttatagcgcgccggcgtatcggcattgatatcgcgcacgcgggtgatgtaatcgtggtcatgcgcgtgacggccatcgtgctgaacgtcttcgtccttcacgcggtcatcgtcgagtttgctgaggatctgctctggcgttacgcccagatcgatccccagatggttaaccagcgtcagcttgccgttttcatcgatacgggcgaacagcgacatttccgtgtaagccgggccgcgctgcaccagcgagccgccggagttattgcagatcccgccgatcaccgaggcgccaatgcacgatgagccgatcaccgagtgcggttcgcgtcccagcggcttaagcgctttttccagcgagtaaagcgtggtgccggggaaggcgagcacctgttcgcccttgtccagcaggtgcagtttgtcgaggcgcagggtgctgataatcacgatgtcacgatcgtaatcgttgccgttcggcgtggagccttcggtcaggccggtattcgcagcctgcattaaaataatcttgtctgccgcaacgcaggcgctgagcacgcgccacagttcgagcaacgtaccggggaagactaccgccagcgcgtcgccctggccggagcgaaagcccttacgatagcgggcggttttggccgggtcggtaagcaggtgagagtgaccaaccaggcgagacagttcgttaataaatgtagtgttatcgtcagttcgaacagaagacatcttccactccttgtggtggggcaaatttctcgctgtaaagcatagcgcgattagccgttgagcggtcgggtattcatgagaaaaatcagagaataaccctgcaaggttttcaggctttatggcacactgcgcttttcgcacggtctggccgggtgcttcccgcggttattgatgagagagaataacaacatgaaatggctatgttctgtaggtgtcgccgtcagcctggcgctgcaacctgcgctggcagaggatttgtttggtaatcacccgctcacgcccgaagcccgcgacgcctttgtcacggatttactcaaaaagatgacggtcgatgagaaaatcggccagctgcgcctgatcagcgtcggtccggataacccgaaagaagccattcgcgagatgatcaaagacgggcaggtaggggccatttttaacaccgttacccgccaggatatccgcaagatgcaggatcaggtgatggaactgagccgcctgaaaattccactgttcttcgcttatgacgtggtgcacggccagcgtaccgtcttcccgattagcctcggcttagcctcctcttttaatcttgatgcggtgaaaaccgtcgggcgcgtttcggcatatgaagccgcagacgacggcctgaatatgacctgggcgccgatggttgacgtctcccgcgatccgcgctggggccgcgcttcggagggcttcggtgaagacacgtatttaaccgccacgatgggcaaaaccatggtggaagcgatgcagggcaaaagcccggcagatcgttactcggtcatgaccagcgtcaagcacttcgccgcctatggcgcggtggagggcggtaaagagtacaacaccgtcgacatgagcccacagcgcctgttcaacgactacatgccgccatacaaggcagggctggacgcgggcagcggggcggtgatggtagcgctgaactctctcaacggcacgcctgccacctccgattcgtggctgctgaaagacgtgttgcgcgaccagtggggctttaagggcattaccgtctctgaccacggcgcgattaaagagctgattaaacacggcacggcgtccgatccggaagacgcggtacgcgtggcgctcaagtccggcatcaacatgagcatgagcgacgagtattacagcaaatacctgccggggctggtgaagagcggcaaagtgacgatggcagagctggacgacgccgctcgccacgtgctgaacgtgaaatatgacatggggctgtttaacgatccttacagccatctggggccgaaggattcagacccggcggacactaacgccgaaagccgtctgcaccgtaaagaagcccgggaagtagcgcgcgaaagcctggtgctgctgaaaaaccgtctcgacacgctgccgctgaaaaaatccggcaccattgccgtggtcggtccgctggccgacagcaagcgcgacgtcatgggcagctggtccgccgcaggcgtggcggatcagtccgttaccgtgctgaccggcattaagagcgccgtgggtgataatgcaaaagtggtttacgccaaaggcgcgaacgtcaccaacgataaagacatcgtgaccttcctcaaccagtacgaggaagcggtgaaggtggatccgcgcacgccgaaagagatgatcgacgaagcggtgaacgccgcgaagcagtccgacgtggtgatcgcggtggtgggtgaagcgcaggggatggcgcacgaagcctccagccgtaccgacatcactatcccgcagagccagcgcgatctgatcgcggccctgaaagccaccggcaagccgctggtgctggtgctgatgaacgggcgtccgctggcgctggtgaaagaagaccagcaggctgacgccattctggaaacctggttcgccggtaccgaaggcggtaacgccattgccgacgtgctgtttggcgattacaacccgtccggcaagctgccgatgtccttcccgcgctccgtcgggcagatcccggtttactacagccacctgaacaccggtcgtccgtataacgccgacaagccgaacaagtacacgtctcgttatttcgatgaggcgaacggcccgctgtatccgtttggctatggcctgagctacaccacctttaaggtctctgacgtgaaaatgtcagcgccgaccctgaagcatgacggcaaagtgaccgccagcgtggaggtgaccaacagcggcaaacgcgaaggcgcgacggtgatccagatgtacattcaggatgtcacggcctccatgagccgtccggtgaaacagctgcgcggcttcgagaaggtcaacctgaaaccgggcgaaaccagaacggtcagcttcccgattgacgtgaatgcgctgaagttctggaaccagcagatgaaatacgatgccgagcctggcaaattcaacgtcttcattggcgtggattccgcccgcgtgaacaaagccgaattcgagctgcaataatcttaccttcctccccatcccccgcctggcgggggatgcctctcatcttgtacgaaaaacggttaaattcgctgttttaagctacgcttttgtctcaagcctatgaaaaaggccacaaaataatgaggaaagcagaatgacgattattaaggggataacaggatcggcggtgcttctggcggcgctaagcctgccgctacaggccgcagagccggttaaggtgggttccaaaattgataccgagggcgcgttgctcggcaatatcattttgcaggtactcgaaagccacggcgtgaaaacggtcaataaagtacagcttggcaccacacctgtcgtacgcggtgccatcacgtccggcgagctggatatctacccggaatacaccggcaacggggcattcttcttcaaggatgaaaacgatccggcctggaaaaatgccaaagccgggtacgaaaaagtcaaaaagctggacgcggaaaaaaataagctggtctggcttacgccggcaccggccaacaacacctggaccatcgcggtgcgtaaagatattgccgagaaaggcaagctcacctcgcttgacgatctcagccgctacctgaaagagaagggcgagtttaagctcgcggcctcggcagagtttatcgaacgcgctgatgccctgccagcgtttgaaaaagcctatgatttcaagctcgatcagtcccagttgctctcgctggcgggcggcgacacggcggtgaccattaaggcggcggcgcagcaaacctccggcgtcaacgcggcgatggcctacggcaccgacggcccggtcgcggcgcttggtctgcaaaccctgaccgacccgaaaggcgttcagcccatttacgccccaaccccggtcgtgcgcgaggcggtgctgaaagcctacccggatattgcggaatggctcaaaccggtgtttgaaaaactggatgcgaaaacgctgcaacagctgaatgccagcattgccgttgaggggctggatgccaaaaaggtggctgccgacttcctgaaacaacaagggcttgtgaagtaacgggacaaggctgtgccaataaaatgtcataaccgcgtcctgctgctgttggcctgtgtggccattgcggcggtcgcgttaccctttgtaaatgtcgcgccaaaccgtctggtgtcgggcgaaccgcgcgcgctctggcagatctggtcatttacgccgctactactgggcgcggcgctggcgagtactgtagccttagccttctggccagggcgagccgccctttggctgacgcttctgctcagcgaagcactgtttatcgtgctgttctggagcgcgggacaggcggcaacgcagatggcctcggttgaaagcccgctggcgcgcacgtcgattggcagcgggctgtggctgtggctggcactttgtctgctggtctgtagcgatgccattcgccgtctcacgccgctacccgtctggcgctggctgctgaacgcgcaattctgggttatccctctgctgatcctcttcagcggcgctctgaatcaactctcgctnnnnnnnnnnnnnnnnnnnnnnnnnnnnnnnnnnnnnnnnnnnnnnnnnnnnnnnnnnnnnnnnnnnnnnnnnnnnnnnnnnnnnnnnnnnnnnnnnnnnnnnnnnnnnnnnnnnnnnnnnnnnnnnnnnnnnnnnnnnnnnnnnnnnnnnnnnnnnnnnnnnnnnnnnnnnnnnnnnnnnnnnnnnnnnnnnnnnnnnnnnnnnnnnnnnnnnnnnnnnnnnnnnnnnnnnnnnnnnnnnnnnnnnnnnnnnnnnnnnnnnnnnnnnnnnnnnnnnnnnnnnnnnnnnnnnnnnnnnnnnnnnnnnnnnnnnnnnnnnnnnnnnnnnnnnnnnnnnnnnnnnnnnnnnnnnnnnnnnnnnnnnnnnnnnnnnnnnnnnnnnnnnnnnnnnnnnnnnnnnnnnnnnnnnnnnnnnnnnnnnnnnnnnnnnnnnnnnnnnnnnnnnnnnnnnnnnnnnnnnnnnnnnnnnnnnnnnnnnnnnnnnnnnnnnnnnnnnnnnnnnnnnnnnnnnnnnnnnnnnnnnnnnnnnnnnnnnnnnnnnnnnnnnnnnnnnnnnnnnnnnnnnnnnnnnnnnnnnnnnnnnnnnnnnnnnnnnnnnnnnnnngggctgacgcccgcgctgatcgcccttgtgctgtatgcgctgctgccgctggtgcgcggcgtggtggcggggttaagccaggttccgcccgacgtgctggaaagcgcccatgcgatggggatgagcgcgcggcagtgtttctggaaaatacagctgccgcttgcgcttccgctgctggttcgcagcctgcgggtggtgacggtgcaaaccgtggggatggcggtgattgccgcgctgatcggggcgggcggctttggggcactggtgttccaggggctgctgagcagcgcgctggatctggtgctgctgggcgttgtgcccacgattgcgctggcggtcgtactggatgcattgtttgccctgtggctcgcgctgctcaggagaagagccaatgattgaatttcatgatgtgagtaaaacctttgcgggccgtccggcggcaagccacctcaatctgcattttgccgagggggcgttctcggtattgatcgggacgtcggggtcgggaaaatcgacgacgctgaagatgatcaaccggctggtggaacatgacagcgggacgattcgctttgccggagaggagatccgcagcctgccggtgctggaactgcggcggcgtatgggctacgccattcagtccatcggcctgtttccccactggacggtggcccagaacattgccaccgtgctacagctggaaaaatggtcccgggggaagatcaatgagcgtgtcgacgagctgatggcgctgctgggcctggacgcgtcgcttcgcgaccgctatccgcaccagctttccggcggacagcagcagcgggtcggggtggcgcgcgcgctggccgctaacccgcaggtgctgctgatggatgagcccttcggcgcgctggatccggtcacccgcggcgcacttcaggcggagatgagtcgcatccaccgtattctagggcgcaccatcgtgctggtgacgcatgatatcgacgaagcgctgcggctggccgatcgtctgatactgatggatcacggcgaagtcgtccagcagggtacgccgcttgagctgttaacctcgccagcgaatgattttgtgcgtgaattttttggccgcagcgagcttggcgtcaggctgctctcgctgcgcaccgtcagggactatctgcgtccgcaggatgcgcaaatcggtggtgaaccgctgcacgatgggatgagcctgcgcgatgccctgtcggcgtttgtcgcccggcagtgcgaggtgttacccgttgcggacgggcaggggacgccatgcgggacgatccattttcgcgatctgctggcgggggaggtgacgcgtgaagtgggtccgtgatccgttactctggctgacagggctgtttatcgccttactctacctgatgccgcacagcgcggcgctgtttaatgcgcttattcccgggctgccgcgcccggtgtaccagcaggagagctttgttaatctcaccctggcgcacttctggctggtggcggtgtcaagcgtgattgccatcgtgctgggcacaggcgccgggattgcggtgacgagacccgcgggcagggagtttcgtccgctggtggagaccatcgccgcaacggggcagaccttcccgccggtggccgtgctggcgattgccgtgccggcgatcggttttgggcaggagcctgccatcattgcgctgattttgtacggcgtgttgcccattctgcaagggacgctggcggggattgcggcggtgcctgcatcggtgctgagcgtagcggaagggatggggatgagcgcctggcagcggctggtgaaggtcgaactgccgctggccgcaccggtgattatcgccggcgtgcgaacgtccgtgattatcaacattggtacggcaaccatcgcctcgacggtcggagccaatacgctgggaacgccgatcattatcgggttaagcgggtttaatacggcttacattattcagggggcggttctggttgcgctggcggcgattgtggtggatcgcctgtttgaacgcctggccggatacctcagccaacaccgccgcgaacaataaatgaataacctgcaagcataacgccaccgataccgctgatggccatcagtgcaaagagggtaattacggccagtttcgttgccttcatcatgtgctcctgttgttaacggaacaattatacggtgaagcgcagctgttaatgaaccattaaatgccgttacgacgcatttggccccagcgagtaaacgggataaccatgttcgcgccattccgtcaggagctgctgctgggaagcggaggggacttcgccgcaccagaccagcagcgtctgtccctcaaacagttccggcctgagctgggccagggagtgggcaagcacgtcaacgcgccagccctgctgggtggcaatccaggcttcgagccacagtcgggtggtatcgtgtacgttccagccgatcaccagcgcatctttgctgtttttattccgcgctgaggcaagacagacggaaatatagttaatcagcacgccatcaagcatgctgagcagtgcctgtaaggtggtttgctgacactgaagccgacgccgtaggggaataaaaagatgggtgatcaaggtttgcgccgggtagtctcgaccctgttctttgatccagccgcgcaaacgctgcaaattgccactctgcaacagcctcagcagcgtttcctgctgctcgcgccagagaagctgcgtatctggatcgtcctggctcagaagcgattttaccttgccgacctgtacgccattgtcgatccagcttttgatctcgcggatccggtcaatatccgcatcgttaaacaggcggtgcccgccgtccgttctttgcggcttaagcaatccataccgtcgctgccacgcccgtagcgtaacgggattgatatcacacaggagtgccacttcacctattgtgtaaagcgccattttcgcccccaggcttgcgcgtccccagcttaactgtagacccactttgcggaaccaggaagatttgattcttttttgtacaaattatacgaaagacaggttatctccggcaaaaggtgtgatggcggacacgatttatcgcttttttggcacgtttcaaagaaagttaaccgctatcagtgtatgttacgcgtttttagaatgtgcggtttgtgagtatgtacgagtttaatctggtgctgctgttgcttcagcagatgtgcgtgttccttgtcatcgcctggttgatgagcaaaacgcgcctgtttatcccgctgatgcaggtcaccgtccgtctgccgcacaaattcctctgctacgtcgtattttccatattctgcattatggggacctggtttggtctccatatcgaagattccatcgccaatacgcgcgccatcggcgcggtaatgggcgggctgctcggaggcccggttgtcggcggtctggtggggttaaccggcggcctgcaccgctattcgatgggcggtatgacggcgctgagctgcatgatctccaccatcgtcgaagggctgctcggtggtctcgtccacagctatatgattaagcgcggtcgcccggataaagtgttcagtccctttaccgcaggggcgattaccttcgtggcggaaatggcgcagatggcgatcatcctgctgatcgcgcgcccgtttgacgatgcgttacatctggtcagcagcattgccgcaccgatgatggtcaccaataccgtaggtgcggcgctgtttatgcgcattctgctcgacaaacgcgccatgttcgaaaaatacacctcggcattttctgccaccgccttaaaagttgcggcgtcgacggaagggatcctgcggcagggattcaacgaggagaacagtatgaaggtggcgcaggtgctgtataaagagctggatatcggagctgtggcgattaccgatcgcgagaagctgctggcgtttaccggtaccggcgacgaccaccatctgccgggcaaaccgatctcctcggcctataccctgcgcgctattgaaacgggtgaagtggtgtatgccgacggaaatgaagtgccgtaccgctgttccctgcatccacagtgcaaactcggctctacgctggtcattcccctgcggggtgaaaaccagcgcgtcatgggcactattaagctttacgaagccaaaaaacgcctgttcagctccatcaaccgcacgctgggggaggggatcgcccagctgctttcggcgcaaatcctggcggggcagtatgaacggcaaaaagcgctgctgacgcagtcagaaattaagctcctgcacgctcaggtgaacccgcatttcctgtttaacgcgctcaacacgctgaaggcggtgatccgccgcgacagcgatcaggccgcgcagctggtgcaatttctctcgacctttttccgcaaaaatctgaagcgaccctcggagatcgtcaccctcgcggacgagattgagcatgtaaacgcctatctgcaaattgaaaaagcgcgcttccagtcacgtttacaggtgtcgttatccgtcccggacgatctggcgtatcagcatcttccggcctttaccctgcaaccgattgtagaaaatgccattaagcatgggacgtcgcagctgctgggaagtggagagattatgatttccgcttcccgttttaaccgccatctggtgctggatattgaagacaacgcggggctgtatgaagcttccgcgtcaggcggtctgggcatgagcctggtggataaacgcctgcgcgcgcattttggtgacgactgcggtatcaccgtcgcctgtgagccagaccgctatacccgaattaccttacgattgccgctggaggagaacgcatgttaagagtgctgattgtcgatgatgagccgttagcacgggaaaacctgcgtgttctgttgcaggagcagagtgatatcgaggttgtgggggaatgtgccaatgcgattgaaggcatcggtgcggtgcataaactgcgcccggacgtgctgttcctcgatattcagatgccgcgcatcagcgggctggagatggtcggcatgctcgacccggagcaccgtccctatatcgtctttctgacggcctttgatgagtacgcggtaaaggcgtttgaagagcacgcatttgattatctgctgaagccgattgaagagaaacgccttgaaaagaccctgacccgcctgcatcaggagcgtaccgtgcaggacgtgacgctgctgccggagcatcagcagcccctgaagtttataccctgtaccgggcacagccggatttacctcctgcaaatggacgacgttgcctttgtcagcagccgtctgagcggggtatacgtcaccagcgctgaaggtaacgaaggctttaccgagctgaccctgcgcacgctggagagtcgcacgccgctaatccgctgccatcgtcagtatctggtgaacatggcgcacctgaaggagatccgtctggaagataacggccaggccgagctggtgttacgtgccgggcaaaccgttcccgtcagtcgtcgctacctgaaaagtttgaaagaggcgatagggctgtaaaactggtacactgcgcgccattgcatcatcgacattcgaaggctctatgctaagtaacgatattcttcgtagcctgcgctacaccctgaaagcgaacaataatgacatggtgcgcattcttgcgctctccgacatggaatccacgtccgccgggttcgacacctggatgactaaagaagatgaagagggttttgttcgctgcccggacattattctgtcgggctttctgaacggcctgatctacgacaagcgcggcaaagatgaatctgcgcctgagctggcgctggagcgtcgggtgaataacaacacggtgctgaaaaagctgcgtattgctttctccctgaaaactgacgacattctggcgatcatgaccgagcagaaatttcgcgtgtcgatgccggaaatcaccgccatgatgcgcgcgccggatcataagaattaccgcgagtgtggggatcagtttctgcgttatttcctgcgtgggttgacgcagcgggtgcataaccagaaggggtgattttagccggatggcggcttcgcctgacccagcctacaaaacccgtaggcccgtgcgagcgtagcgccgccgggcaaaaaaaannnnnnnnnnnnnnnnnnnnnnnnnnnnnnnnnnnnnnnnnnnnnnnnnnnnnnnnnnnnnnnnnnnnnnnnnnnnnnnnnnnnnnnnnnnnnnnnnnnnnnnnnnnnnnnnnnnnnnnnnnnnnnnnnnnnnnnnnnnnnnnnnnnnnnnnnnnnnnnnnnnnnnnnnnnnnnnnnnnnnnnnnnnnnnnnnnnnnnnnnnnnnnnnnnnnnnnnnnnnnnnnnnnnnnnnnnnnnnnnnnnnnnnnnnnnnnnnnnnnnnnnnnnnnnnnnnnnnnnnnnnnnnnnnnnnnnnnnnnnnnnnnnnnnnnnnnnnnnnnnnnnnnnnnnnnnnnnnnnnnnnnnnnnnnnnnnnnnnnnnnnnnnnnnnnnnnnnnnnnnnnnnnnnnnnnnnnnnnnnnngattctcatccggcttttttattacttcacctgctgacccggcttcgcgccttcgtcagggcttaacaggaagatatctttcccgcccgggcctgcggccatcaccatcccctcagagatgccgaagcgcattttgcgcggcgccaggtttgccaccatcacggtctgacgaccaatcagcacctgcggatcgggatacgcggaacgaatgccggagaagacgttacgcttctcgccgcccagatccagggtcagacgcagcagtttgtcagaaccttccacgaactccgcgttttcgatcagcgccacgcgcaggtcgactttggcgaaatcatcaaaggtgatggtctcctgaatcggatcgtccgccagcgggccggtcaccggtgcggcagccgctttcacctcttctttggatgcttccaccagcgcgtcaacctgcttcatctcgatgcggttatacagcgccttgaaggtgttcaccttgtggccgagcagcggctgctggatggcatcccaggtcagttcggtgttcaggaatgcttccgcgcgggctgccagctgcggcagaaccggcttcagccaggtcatcagcacgcggaacatgttcagacccatggtgcagatcgcctgcaagtcggcgtcgcggccttcctgtttcgccaccacccacggcgcctgctcgtccacatagcggttggccacgtctgccagcgccatgatttcgcgaatggctttaccgaattcacggctttcccaggcttcgccaaccgcagcggcggcgtcggtgaaggttttatacagctcaggatcggccagttcggcagaaagcacgccgtcaaagcgtttggcgataaaacctgcgttacgggacgccaggttcaccaccttgttgacgatgtccgcgttcacgcgctgcacgaaatcttccagattcaggtcgatatcgtcgatgcgggaagagagcttcgcggtgtagtagtagcgcaggctgtccgcgtcaaagtggttcagccaggtgctggccttaataaacgtcccgcgagatttagacatcttcgcgccgttcaccgttacgtagccatgtacgaacaggttggtcggcttgcggaagttgctgccttccagcattgctggccagaacaggctgtggaagtaaacgatgtctttaccgatgaagtgatacagctcggcatcggaatctttcttccagtattcgtcgaagcttacggtgtcgccgcgcttgtcacacagattcttgaacgaccccatgtagccaatcggcgcatccagccagacgtaaaaatatttgcccggcgcgttcgggatttcgaagccaaagtagggcgcatcgcgggagatatcccactgttgcagaccggattcgaaccactcctgcattttgttcgcgacctgctcctgcaacgcaccgctgcgggtccacgccttcagcatttcgctgaacgacggcaggtcgaagaagaagtgctcggagtcacgcatcaccggcgtcgcgccggagaccacggacttcggttcgataagctcggtcgggctgtaggttgcgccgcacacttcgcagttatcgccgtactggtccggggatttacatttcggacaggtgcctttgacgaaacggtccggcaggaacatgcctttttccggatcgtacagctgagagatggtgcggtttttaatgaaaccgttctctttcagacgggtgtagatcagctctgacagctcgcggttttcgtcgctgtgcgtggagtgatagttgtcatagctgatgtcaaagccagcaaaatcggtctgatgctcctgactcatttcggcgatcatctgttccggggaaatgcccagctgctgcgctttcagcatgatcggcgtgccgtgggcatcgtccgcacagatgaagttcacctcgtggccgcgcattcgctggtaacggacccagacatcagcctggatatgctccagcatgtggccgaggtggattgagccgttggcgtacggcagggcgcacgttaccagaatttttttcgcgacttgagtcatagtaggcattacttcttttaactgtgaaaagggttttcgatattaccaaaaggggcattattaagtaagcacaaaccgcggcctttcaggtaaacttgtttgtctaaggtcttattcacaagaacaaaggagtcgggatgagttctcaatcccaggccaaatcaccggaagccttacgagcaatggtcgccgggacgctggctaattttcagcatccaaccctgaagcacaatctcacgacgttgaaagcgcttcatcacgtcgcatggctggacgatacgctgcacattgagctacagatgccgttcgtctggaccagcgcctttgatgccctgaaagagcaaaccagctctgagctgctgcgcattaccggcgcaaatgcaattgactggaagctaagccacagcatcgccacgctcaagcgcgtgaaaaatcagccgggcgttaacggcgtgaagaacatcatcgccgtcagctcgggcaagggcggggtgggtaaatcgtcgaccgccgtgaacctggcgcttgcgctggcggctgaaggggcgaaagtcggcattctggatgcggatatctacggcccgtccattccaaacatgctgggggcggaaaaccagcgtccaacttcgccggacggcacccacatggcgccaatcgtggcgcacggtctggcgaccaactccattggttacctggtcacggacgataacgcaatggtctggcgtggcccgatggccagcaaggcgctgctgcaaatgttgcaggagacaatgtggcctgacctcgattatctggtactggacatgccgccgggcacaggtgatatccagctgacgctggcgcagaacattccggttaccggcgccgtcgtggtcaccacgccgcaggatatcgcgctgatcgacgccaaaaaaggcatcgtcatgttcgagaaggtggaggtgccggtactgggtatcgtcgagaacatgagcatgcatatttgcagcaactgcgggcaccatgagcctatctttggtaccggtggcgccgaaaagctggcggcgcaataccacacgcaactgctggggcaactgccgctgcatatcacactgcgtgaagatctggatagcggtaagccgacggtggtcagccgtccggatagcgaattcacggaaatctatcgtcagctggcggggcgcgttgcggcgcagctttactggcagggcgaagtcattccgggtgaaatcgccttccgcgcggtgtaacgcctctgcgcgttagtgccgggtggcggcttcgccttacccggcctggctcgattttgtaggtcaggtaagcgtagcgccacctgactttacccaagccgatagtgcatcaaataatactctccgtccggagaatctcccgtcgcctcaatgtgccagccgtggcgctggtaaaacgcaaccgcccgctcattcttcaccagacacttgagtgaacccgtgctggtaaacgtcttctgcacgtgttcaagcaacacatgtccaacgcccaggctctgatagttcggatcgacaaacaggttgtgcagaaaattatcgttcgtcgagactgaggcaaagccaagtcggtgcccatcctgctccgccacccaaatctcttcgtccagggttgccgcgtcaaaatcttcaagctgccacgcagaactgtccagccacggccaggcttcacgtcgggcgtgaaggaagagcgtgcgcaggaaagggcgatcgctctcctgccacggacggattaggatcgtatcagcggtgatagaaaatatctccgttataggctttgtagattttgccatcggcatcgccaatcagaacgtaattctcacccatgtaggtccagtgtgtaccggcatcgggcgcaggaaggttacgcagctggtactgtttgatggtgtactcaggcgtctgatactgcgcgggcgcggtgtcgccgattttaaacttcgtaaaatcggcaataaactcttgctcttcataggccttgatgccggaaggcgctgtcgatgtttgcggtgcagcgtgcgcggcccccgccagtgacagtaatacacccagaagcaacaatttacgcttagccattttttctccagtcatatcgttactgatactttttgtgtgcagatccgctaacggatggcagacagttcattttaagtatcctcacagggtgagtttgcaaaaaatgtaacaaaagtgcacggttttgtgtagtcgcaaccgtcattaattattacttcgacgaataaatatgagcttatacagataacataattattggtttattaattaattctgaaaaaacattttcaaggcaaatttactaagattcaggcatgcattcaacaaatagaacatttaagattgcctgaaaccctctttccgaatgcctgattaagacaatgcagggctgtaaagtctgcccaaaggaatgtcgtgtggttttataaatactctttgtgtttctgttaattcattgaataacagcaacttgtgcttgagtgaaatgttactgttttatcctgtatacgataatcactactataaaagatattatgtaataaatgaaaaacacaacagttgtatcgatattatttttaattattaccctcttatctggctgcgtattttaccctggccagcatctcgatctcgctgggaaaaagataattgccgcagaagatgcaaatgatcgtcttgagaaacggattgatgtttatcctcttacgccttcgttaattgaaaaaatgcgaccatcggttttgaaatctcaggcaaatcctaatctggatgaacaggtcaaaaactgggaataccgtatcggcgttggggatattctaaccgtcaccgtctgggatcaccctgaactgacaaccccggcagggcagtatcgtagcgccagtgacaccggtaactgggtcaatgccgacggcacgcttttctatccctatgtcggtaaattgccggtggctggcaaaacggtcgcacgggtacgcgaggagatcacggcccggctgaacaatgttattgaaagcccgcaggtggatgtcagcgtcgcctcttttcgctcacaaaaagcctatgtgacgggcgaggtggtgaagtcagggcagcaggctattaccaatatcccgttaacggtcatggatgccgtgaacgccgctggggggctctctgccgacgcggactggcgcaatgtcgtgctgacgcataatgggaaggacacgcgcctctcgctatatgcgctgatgcagcatggcgatctcacgcaaaataagctgctctatcccggcgatattctgtttgtcccccgtaacgatgcgctgaaagtgttcgtcatgggcgaggtcgttaaacagagcacgctgaaaatggatcgcagcggcatgaccctggccgaagcgctgggcaatgccggtgggctgaaccagaatatggccgatgccaccggaatttttgtcattcgttcgctgccgaaaagcgagcgttcagaaaaaattgccatcctctaccagctcaatgctcaggacgcatcagccatggtgttaggcaccgagtttcagcttgagccctatgacattgtctatgtcaccactgcaccactgtcccgctggaatcgcgtgatatcacagcttgttccgaccatcagcggggtgcatgaccttaccgaaacggttcgttacatcagatcgtggccgcaataatgttcaaatcaatactcgtggtttgcaccggaaatgtctgccgttctccgattggggagcggcttttacgccagcacctgcccgacagatatatcgcctcggcgggcatattcgggcttgaagggtgccccgcggatgacagcgcccaggacgtagcctggcggcatgggatttccctcgacggtcatgtggcgcgaaggctgacacgcaatttgatgcagggatccgatcttatcctggttatggagccggaacatcttcgcttcattgcggccatggcgccggagattcgaggaaagtcgctgctttttgggcaatggctggagccgcaggagatccccgatccctaccgtaaaagccgggaagcgtttgaatatgtgtttgggctattgggtaaagccagtcaggaatgggcacgtcgtttaggtcagaaaggaatgaagcattaatgtcgtcttacacaacagacaattatggtgcagcggcaccccaacaacatgaagtcgatctcgttcgtttgctcgtcgagatgatcgaccaccgcacgatgattctgtgcgtgacgttcctgttcatcctgtgcgccggtctctatgcctggattgcgccacctgtttatcaggcggatgccatggtgcaaattgaaaacaaacacgataacaacctgctcaaaggtttgagccagctgggcaccgatgtgtcgccggatgttgcccctgaaattttactgctgaaatcccgcatgatcctcggcgagaccgttgataaattagctctgacacagcaggcaaagcagcgcgttttgcctgtggtggggcgtctctggcagcgtctgcaagggcgtgagcagggcaaaatcacgttaggcgaactccagatcccgcaggtggaaggcaaagcgcaagagctcacgctgaccgtacaggaagcgggaaaatatcacctgacgggcgaaaacattgaggccgacggccaggttgggaaaacgctggttacgcaagggatcgttctgctggtgacgtcgattgaggctgagccaggcacgcaattttcgcttaagtcgttgacgcggcttgagacgatcaacgcgctgaagaagcgtctcacggttgcggaatcggagaaacagagcggtatcgtgaccttaaccctgacgggcgaagatcctgacagcatcgcccgggtgctgaatgcaattgctgaaaattatctccagcaaaatatcgcgcgccaggaggctcaggattctcgtagtctggattttttacaggcgcagttgccgaaaatcagcgcggaccttgatcaggcagaagcgcggctgaatgcctaccgggcgcagcgcgactcggtggacctgtctctggaggcaaaatctgtcctggatcaggttgttaacgttgagaatcagctaaatgagctgacgttccgggaggcagagatctcccagctctttaaaaaaagtcaccctacctatcgtgcattgcatgaaaagagacagacccttgagcgggaacgggagcgtctcaataaccgagtgtcagctatgccctccacgcagcaggagattttacgcctgagccgtgatgttgagtcgggtcgcacgatttatttacagctattgacgcgccagcaggagctgaatatttcccgctccagcgctgtcgggaacgtgaggatcattgatgaggctgttacgctgccggacccgataaagccgcgtaaagcgttaatcatcgttcttggcgcgctgttcgggctaatgctctcaatggggaccgtgctggtacgtcaggcgttcaaacgtgggatcacgctttccgaacagctggaagcgcaggggatgccggttctggctacgttgccacgttcacagtggctgtggagtaaaacgcagttgcgcagaaaaaatccgttttctcgtcgctggaaacacaaaacctcggatgtgcctttcctgcccgtcgatcgccctgctgatatgtttgttgaagcagtacgcgggctgcggaccagtctgcatttcaccatgatggaggctgagaaccgcattgtgatgatttctggccccacgcaggactgcggaaaaacgctggtggcgacgaatctggcggccatcgccgggcagagcggtcagcgggtgctgtttattgatgcggatatgcgccagggctatgttcataatatttttggtctggagaaccgccacggattgtcctgcctgctcgaagggaaacgcgacttagcggaggtcattcagcatgctgaaaaagggggaattgacgtcatcacctgcggcccggaccccctgcgcccgttagaattgctgttaagcgaacgattcctttccgtcaggtcctgggttaacgagcaatatgacattgtcatcattgatactccgccggtcctggccgtcaccgatgccgcgctggtcgccagagcagccggaacaacgctaatggttgcccgtttcgataaaaccagcgtgaaagagatggagaatactgttaaacggttacagcacgtcggcgtgaaggtcagcggcacaatcctcaacgatattgttaaatccgcagcgctgtattacagctcggggtacagccagtatgaatacggttatgcttcgaggaaaaaaggggaaaggcgttagcgcgggaaaaacaatccctctcccgggtgggagagggataagtattacttcgccatcacttcctgcgcggtacgctcaaccagagacagcaggatttttacgtcctccagcgtcacggttgggttcagcagggtcagcttcaggcaggtgataccgttatgctcggtcacaccgacgtttgcacggccagactccagcagcgcatcgccaattttctggttcagcagggcaataccggcgtcatccatctgcgcctgcggacggaatcggaacagcacgcttgccagctggggttgcatcaccagttccagagcagactgctctttcacgtaagccgcaacctgctgtgccagcgtcacgccgtgatcgatgattgccgcgtattgctcctgacccagcgcttccaggctcatccacagtttcagcgcgtcgaaacggcgcgtggtttgcagagatttggagaccaggttaggtacacccgcttcttcatcgaactcagagttcagataggccgcctgatagcgcatcagttcatagtgacgcgcttctttcagcaggaacgcaccgcagctgatggtctggaagaactgcttgtggaagtccagggtgacggaatccacgagctcgataccgtccaggtagtgacgatactgctcagacatcagcagcgcgccgccccaggccgcatcaacgtgcacccagatattctgtttcgcagccagctcagcaatagcacgcagcggatcgatagcacccgcatcggtcgtaccggccgtggccacaatcgccaggatctgctcgccgttcgcgttgcactgttcgattttcgccgccagatcggtgagatccatgcgggagaattcgtcagttttcacctgcaccacggactggtagcccagacccatcagcgccatgtttttctgcacggagaagtgggcattttccgaacacagcacgcggatcttacgcagatcgcctgtcagaccgtcctgctgaaccgagtggccctgacgcgcaaagaacgcgtcacgcgccagcatcagccccatcaggttactctgggtgccgccgctggtgaagacgcctgcgtcgccagcctgataacccacgcgggtacgcagccattcgatcagtttgatctcaatgatggttgcggacgggctttgatcccaggagtccatactctggttagtggcgttgatcagcacttccgccgcctggctaaccaccaggcttgggcagtgcaggtgcgccacacactgcgggtgatgaacggacaaactgtctttcaggaagaactccacggcgnnnnnnnnnnnnnnnnnnnnnnnnnnnnnnnnnnnnnnnnnnnnnnnnnnnnnnnnnnnnnnnnnnnnnnnnnnnnnnnnnnnnnnnnnnnnnnnnnnnnnnnnnnnnnnnnnnnnnnnnnnnnnnnnnnnnnnnnnnnnnnnnnnnnnnnnnnnnnnnnnnnnnnnnnnnnnnnnnnncgatcgccgcttcgttgcccagccctttcgggttgaaatccagcttaatacggtcgcgcagctccgcgaccgttttgccctggtacatctcaggctgtttcagccactgcatcacagcctgagtgctttgttcaatcgcctgctggtaagcttcaatgctctgcgcagaggagaacaaaattgggtttgaatcagacatcgtattcaacaactccggttacgccgggctaacgcccgcagcaagcagtgcctgctcgaatttatccaggaagactttcagctcgtcatcgctgatcagcagagaaggcagcagacgcagaacgataccgttacggccgccacgctccagaatcaggccggcttcgaagcatttcttctggatcagggcagacagctcgccatcgcccgggaagcaacccatgtgatcggcggcttcatgtggcttaacgatttcaataccgatcatcatgcccagaccgcgaacgtggccgatcaccggatagcgtttcgccatctctttcagctggcctttcagccattcgccctgtgcagctactttgcccgcgatgttctggtctttcaggatcttcagcgtggtcagaccggttgccatcgccagctggttgccgcggaaagtaccggtatggtgacctggcgcccatgcatcgaactgctttttgataccgagcacggccagcggcagaccgccaccgactgctttagacatcacgatgatgtctggctcaatgccagcgtgttcgaaggcaaagaatttaccggtacgggcaaagccagcctggacttcgtcgaggatcagcaggataccgtgttcctgagtgactttacggatgcgctgcaaccactcaacaggcgccgggttcacgccaccttcaccctgaacggcttcgaggatcaccgcggcaggtttacgcacgccgctttcgacgtcgttaatcagattttcgaagtagtaggtcagcgccttcacgcccgcttcaccaccgatacccagtgggcaacggtactcgtgtgggtaaggcatgaactggacttctggcatcataccgtcaaccgcttctttcggagacaggttgccggtgacggacagtgcgccgtgggtcataccgtggtaaccaccagagaaactgatgataccgctacgaccggtcacttttttcgccagcttcagcgccgcttcaacggcgtcagccccggacgggccagtgaattgcaggcagtactctttgccctgaccaggcaacagagagagcaggtattctgaaaacgcgtctttcaacggcgtggtcagatccagggtatgtaacggcaagccgctggtaatgacattttggatgcttttcagcacatcaggatgattgtggccaagcgcaagggtgcctgcgcctgctaaacagtcaaggtattctttattatctgcatcggtgatccacacgccttctgctttcgtgattgctaaaggcagtttgcgcggataactcctgacgttagattcaaactcggcctgacgggccagataggtttcgttgcttttgtgggcatctacggtgtcaatacggactttatccgtcatcatatcactcctacaaccgccgcttcgttatgagccacgattgaataaaaagttaaaaaacagatggggcctgaaaaaaacgccgccaatatagagccttttgtcaccgggctcaatggttaatttgcttactgttttgtgacacagggcacagggcagggaagatcgccgtttgtatgggggagattgcactttatgctaaataaaaacagcagcttacgtatgatttatccgcattgtaaaatcagacaaaagagtgtgacaaatcgtgcgattgtcaggtgaaaaggaggcagtgagcctccttacgctgtttatttctggctaacgcgtaaaataccgtgttcgcgtcccttcgttttattccacgacgcgtccgtaataccgttttcatccaggcttagcgatatcacaaaaccattaccacggatctcatagaaattcgcattcagacgtttaacgctggcttttttgccgtttacggtggcgctaaagaagccgttagaaagcgtggcgttaaccgtatccgacgagaacgaggcttcacgcaggggatcgtgaacggatgtcgttggttcgtgttgtgccgcattttccgctctggttttgctgatatcgcaagagccatcgccagcgctaatttgcgtgcatcccgaacgctctaattgagcgcgataatgggcgtttatggcgtgcgccggcgagacacaacctgcaagcacggtggtacttataacgaacatcattacttttttcattttatcgccttaaaaacgacacaaataccatgagacatacatcacgccgatccagatcccgaccgaaatcagcatcagatacagggctaccgaaataaaaatatatttagacatctttttgtattaacaaaatgcccatccgctaaaatgaggcattctatttttcccgatgattattttacgcgttaaaagcccattccaatcccaaccgaagcgcccatattattcgcggtatcatctgagaagctcactttcgcgatgacatgggaattaaagttaacggacgcaccgacagcaagcgcgctctcgccgttgtaagtcgcgccgccagcagagaacatgacgcgctgattggtttgcacttgtggcaaacccgccatcgccatcgcccctgaaataccggcattggcctgcttcttattattgtccacttcatcacgcagagatttaaattgctggctggtggtagtattcattgcctgtaatgtctgcctggtggcttgcagatcctgcgtggcggcagtaacagccaggctatttttagcgaccttcgcctggatagccgtatccagctgtcgttgtgtcacggtggttgtcacaccatctttaccgttatgaccgtctacaccgtcgcgaccgtttcttcccgcaatgccttgtgcgccagtatcaccctttatcacctttcgctccatctgtaccgttgatgggtttaggtgcattttcgagagcagtaaggcggctatcctgaatattatcgacgtgttgaaggttgataatggctgcgccgttagtcgccacaccctgtagggccgtctcacttttcagactggcggtatcggcaagcgcgccggcaagcaacgctttctgatgtgcgtcgttagccattttatccacgactaacacgcctaattttgtggactgaaggtcgtcattaacctgcgttaagcggttatccgttgcgatatcacggttaatgctatcagcgttgttttgtgtaatctgatcctgatggtcatttacaatattagtgatttgccgatcgtcccaaaccgtattcgcggcttcagcctggctcattgtacccgctaagacaacgcccattaaaaaaatagcaataaaggttttattcatagatttcatttgaaaagctcacatcattaattgtcgaaaaatactgaagctgaatcgctttgttttgtggatttaaaaaacgggtgaacgttgtctaaatcttatttagtaacgcgagtaaactatcaattaaacgcaaaccaatgatgttgatctaagtcataaatattatgaatagttccgacggcgtaaaagtcattttgcggttgttattaatgtaaacattaaggtgaaaatgaggtggtaaatgagagagttaaattaagtgtttgacagagataaaattctgcaaaataaatgtttacattaatatgtgggtttatttcatacgaaagaaggtgggctgtcttataaaagcactcccggtgcctcattatggataaaaataatatttctcagcacagtgagtaaataatatttttcatgtgttcttaacaaatctggcgggataattaactgaacaataatgtatacatatagagggtagttaatatcttgtcgtttattgttcgttacaggggattaacggacagcccaaaaccccttgcacccgggttaccccccggttacactacatgactacgaattgctatttcgtaaatagctgttttataagtaatttgactcggggtgcccttctttgtgaaggctgagaaatacccgtattacctgatctggataatgccagcgtagggaagtcagatgcctacccggtcatcgcttcttcacgcacggcaggagcgaaatcatgcagcctgacctgctagactcacacgttttacatcaattccgaacccgttccccgctcacgcactgtatgaccaacgatgtcgtgcagaccttcaccgccaacgttttgctcgcgctgggtgcttccccggcaatggtgatcgaagccgaggaagcggaacagtttgccgcgcttgccgatgctctgctcatcaacgtgggtacactcaccgcgccgcgcgcccagtcgatgcgtcgggccattgagagcgcggtagccgcgggtacgccctgggttctggatccggttgcggttggcgcgctggcttaccgcacccgattttgccagcaaatattgtccctcaaacctgcggccattcgtggaaacgcctccgaaatcctcgcccttgccggaatgagtgcgggcgggcgcggggttgattccaccgatacggcggcgagcgcgttgaccgctgcgcagacgctcgcccgtcagacccatgccgttgtggtcgtcacaggagaagtggatcacatcactgatggtcagcgaacccgtacggtcgcaggcggcgacccgctgatgacccgcgtggtgggaacaggctgtgcgctctcggcggtcgtcgccgcctgctgttcgctgcctggcgacaggcttgataatgcgacggcagcctgcggctttatgaagcgcgcagggtcagctgcactgactcacagccggggccccggcagcttttcccccgcgtttctggatgcgctttacgcgctggaggagctggtatgacacgcattaatgccttgactattgcgggaaccgatcccagcggcggagcggggatccaggcagacctgaaaaccttctctgcgctcggcgcttacggatgctcggttatcaccgcgctggtggcgcaaaacacgcgcggtgtacagtcggtatatcgtattgagccggattttgtcgccgcacagctggattcggtattcagcgatgtacgcatcgacaccaccaaaatcggcatgcttgcagaggcggacattgttgaagcggtcgctgaacgtctcaaacgttatcagataaaaaacgtggtgctcgataccgtgatgctggccaaaagcggcgatccgttgctctccgcctctgccgtcgacaccctgcgtaaaaagctgctgccgcaggtggcgctgatcacgccaaacctccctgaagccgccgcgctgctggatgcgnnnnnnnnnnnnnnnnnnnnnnnnnnnnnnnnnnnnnnnnnnnnnnnnnnnnnnnnnnnnnnnnnnnnnnnnnnnnnnnnnnnnnnnnnnnnnnnnnnnnnnnnnnnnnnnnnnnnnnnnnnnnnnnnnnnnnnnnnnnnnnnnnnnnnnnnnnnnnnnnnnnnnnnnnnnnnnnnnnnnnnnnnnnnnnnnnnnnnnnnnnnnnnnnnnnnnnnnnnnnnnnnnnnnnnnnnnnnnnnnnnnnnnnnnnnnnnnnnnnnnnnnnnnnnnnnnnnnnnnnnnnnnnnnnnnnnnnnnnnnnnnnnnnnnnnnnnnnnnnnnnnnnnnnnnnnnnnnnnnnnnnnnnnnnnnnnnnnnnnnnnnnnnnnnnnnnnnnnnnnnnnnnnnnnnnnnnnnnnnnnnnnnnnnnnnnnnnnnnnnnnnnnnnnnnnnnnnnnnnnnnnnnnnnnnnnnnnnnnnnnnnnnnnnnnnnnnnnnnnnnnnnnnnnnnnnnnnnnnnnnnnnnnnnnnnnnnnnnnnnnnnnnnnnnnnnnnnnnnnnnnnnnnnnnnnnnnnnnnnnnnnnnnnnnnnnnnnnnnnnnnnnnnnnnnnnnnnnnnnnnnnnnnnnnnnnnnnnnnnnnnnnnnnnnnnnnnnnnnnnnnnnnnnnnnnnnnnnnnnnnnnnnnnnnnnnnnnnnnnnnnnnnnnnnnnnnnnnnnnnnnnnnnnnnnnnnnnnnnnnnnnnnnnnnnnnnnnnnnnnnnnnnnnnnnnnnnnnnnnnnnnnnnnnnnnnnnnnnnnnnnnnnnnnnnnnnnnnnnnnnnnnnnnnnnnnnnnnnnnnnnnnnnnnnnnnnnnnnnnnnnnnnnnnnnnnnnnnnnnnnnnnnnnnnnnnnnnnnnnnnnnnnnnnnnnnnnnnnnnnnnnnnnnnnnnnnnnnnnnnnnnnnnnnnnnnnnnnnnnnnnnnnnnnnnnnnnnnnnnnnnnnnnnnnnnnnnnnnnnnnnnnnnnnnnnnnnnnnnnnnnnnnnnnnnnnnnnnnnnnnnnnnnnnnnnnnnnnnnnnnnnnnnnnnnnnnnnnnnnnnnnnnnnnnnnnnnnnnnnnnnnnnnnnnnnnnnnnnnnnnnnnnnnnnnnnnnnnnnnnnnnnnnnnnnnnnnnnnnnnnnnnnnnnnnnnnnnnnnnnnnnnnnnnnnnnnnnnnnnnnnnnnnnnnnnnnnnnnnnnnnnnnnnnnnnnnnnnnnnnnnnnnnnnnnnnnnnnnncgccgatggtatcgaccacggtagcaggaaacgccggaacgtgtccggaagcgtcaccgtcgtaccagaccgccccgtctttatcatggcgtacgatcagcgcagcgccaaacctctgctgccaccgtgtgccgagctcttccacgtttacgccaagccattcggcggcaagttccgcctcctgacgattgagcgagacgattggtttgcaggccatgatccgcgccatcagcgggtcgggaatatccgcgatgcgcggaccgaaatcgataaagagcgtcacatcctgaagactttccagccaggccgtcagcagctcaccgctgggggacgccagctggtagccggacaaagagatcaggctccctgccggcacgcttaacccgtccagccagcgctgctgccactggttctccacgccgctaaacgacataaaggtccgttcaccgtcaggctccaccagcgccaggcaccagccgttatcgcccgtttccgcttccacggcgctgtgcagatcctgcttcgccatggcgttacggataatatcggcccacacgccgtggccgacgggaagggcgttttgcgcagcaatgccgagccgcttcagggcgatggcgatattcagcgcgcagccgccaatattcactccctgttgcttcagctcgatatcacacccgcgccagggcagggcgtaggcgtcggcaatcacgtcgatgaccgccgcgccgagtaccgttacggggcgcgtggcgtgaagggtttcgagacggcgggcaaaagcactcatacgccctccctttgctcccggaagtgcagcagtttttcgcagtagtggccgaaatcgagccggtttacggcatcaagttcgtttttgagtgccggatcaatggcctgtacaccgtgcagcgcgccgcagatggccgttgccatcgcgccgatagtgtcagtatcaccgcccaggttggcgcataacaccgcgcagcggttcggatcggtacccgcgagttcgaccatcgcaatcgccgccggaacggactcaagggtgctcgtgcccgcgccaataagctgatagatctgctcgctggcggactcggtaccgttggcttcgcgcacggttttcagggccagctcaatacgagcggaaagcgatgcgctgaaggtggtcgtgttcgcctcctgcgccgcacgggcaatacccggcagggcatcggcgatgtgatgccagcgctcgccgtcgatagcgcgtgaaaccgcccaggcgatcaccaccgcaccggcgatggcgagatccgatttatgggtcgggctggaggctaacgcaacctgttccacaaagtgcgccagacgcgtggctggcaggaggcatcccagcggggaggcgcgcatcgccgccccgttggtaacgccgttgttttccagctggctcaccggcttgccgtcacggatggcgttcagggcaattttggaggtcgggccgagcacattcttattgaacgcgtcaaaatccagcgcccagtccagaatatgcttaccgataacgtcagggttaatttccccgtcgcattcgataatcgcgtcggccaggcacagcgccatcgacgtatcatccgtaaattcggcctgcttaaagtaacaggcggcattattctcagccgggccgggtaagaaacggtcgatccagccgaagtgcgctttcacccgcttgcgcggccacagctccgacggcatccccatcgcatcccctaacgcctgcccgtaaagagcaccgagaatacggtcttgtttcatttaacttcccctcgtgtcagcgcggtatcgccatcaaccacctcaattgcggtgatctctttatccgattcgcggaaaaacagcataaacagcacggcaatcaccacaatcatgattgcaccaaacgtccacattccggcccagttgaaggtcagcccattcaccggctctttatatgcgaacattttttccatcatcacgccgccgagacggtaacccagcaggctaccaaagccctgacagcacagcgtgatcaagccctgcgccgcgttgcgcatgtgcacgggcgcttttttatccacgtagatgtacgcggtgacgtaatagaagtcatagcttacgccgtgcagcagaatgccgaggaacagcagggcgtaggtgaagtattgctcggcgccgccgtaaacaaagaaaccgtagcgaatggcggcggtgatcaggcccagcagcaagaccttcttaataccaaagcgtttggtaaagaatggcagagcgagcatgaagaagatttcagagaactggccgagggtcatccagccggtggcgtttttcatccccacttcggtgagatagccgttggcaaagatatagtagaaggccagcggcatggcgaacaggaacgagcagaagaagaacaccaggaagtttttatcgcgcagcaggatcagcgcatccagccccagcatcactttgaaatccagcttgccggtactcttcggcggggtattcggcaggaacagcgcgaagacgccaagcagaagggagctggcagcggtcatcagcagcgggatattggtgtcagagatgtcgctatagcccatcatctgcggcaggaagccgcacgccaggccggaggcaatccagccgatggtgcccatcacgcggatgcgcgggaaatcagcctccacgtcatcgacgttcgcaaaggcgatgctgttggtcagcgcgatggtcggcatataggtcagggagtaggccagcagcagcgggaagaaggtgctgaactgggtttgctgtgctgcgaaatacatcagaatcgcgccagcgaacatcagcacggccagcactttctgggcggcgaagaaacggtccgtcagcgagccgacaaggatgggagagaggatcgcggcaatcgcggtacaggcgtacgaccagccaatttccccggcggtaaacccgctcttactcagccacagccacagcggcacaaaccatgcgccccagataaaccattcaacgaacatcatgaatgacagttggactttcgttttcattttttaatcctgcatgtcagaggtacgcatgtaacataccatgtgataataccttttaaatacctttaaggcgattgtttgatcagtgtaacaaaaatgttgtacacgaaacgagccagcagattgtgcttaaaaaagttgcaaatggtggaaaataggttaagtcggtaccaggcttagtctgcctgcaaaaacgtgggcttggatcacacgctccgacatcatgtcggacttacgggagcatcactatgactgatattgcgcaactgcttggcaaagacgccgacagccttttacagcatcgttgtatgaccattccagccgatcagctttatctgcctggccatgattacgtagaccgcgtcatggtcgacaacaaccgtccgcctgccgtactgcgaaacatgcagacgctttacaataccggtcgtctgggcgggaccgggtatctctccattctgcccgttgaccagggcgtagagcactcggcgggagcgtcgtttgctgctaacccgctctactttgacccgaaaaacattgtcgagctggcgattgaagcgggctgtaactgtgtggcatcgacctatggcgtgctggcctccgtttcccgccgctatgctcaccgcattccgttcctcgtcaagctgaatcacaacgaaaccctgagctacccaaccgaatacgaccagacactgtacgccagcgtcgaacaggcgttcaacatgggtgcggtagcggtcggggcgactatctattttggctctgagcagtcgcgtcggcagatagaagagatctctgccgcgtttgagcgcgcgcacgagctggggatggtgaccgtattgtgggcctatctgcgtaacaacgcgtttaagaaagacggcgtggattaccacgtatcagcggatctgaccggtcaggcaaatcacctggcggcaaccatcggcgcggacatcgtgaaacagaaaatggccgagaataacggcgggtataaagcggtgaactttggctataccgacgaccgcgtctacagcaagctgaccagcgacaaccctatcgatctggtgcgctaccagctggctaactgctacatgggccgcgccgggctgattaactccggcggtgcagcaggcggtgaaaccgatctgaccgacgcggtgcgcacggcggtgattaacaaacgcgccggcggaatggggctgatcctgggccgcaaagcgtttaaaaaatccatggccgacggcgtgaagctgattaatgcggttcaggatgtctatctggacaataaagtgacgattgcctaatcgcacgcatcttcctgccgggataagcgtgacccggcaggaaagttctctcgcttactccttcagcgtttcaggatgaggagtattcagcagacccgccatccctctcttgctgctatttgctttttctaagcccggctgcgtgacgcggataaaggcacacagaacaaaagccagcagataaagcaccgtataggcgnnnnnnnnnnnnnnnnnnnnnnnnnnnnnnnnnnnnnnnnnnnnnnnnnnnnnnnnnnnnnnnnnnnnnnnnnnnnnnnnnnnnnnnnnnnnnnnnnnnnnnnnnnnnnnnnnnnnnnnnnnnnnnnnnnnnnnnnnnnnnnnnnnnnnnnnnnnnnnnnnnnnnnnnnnnnnnnnnnnnnnnnnnnnnnnnnnnnnnnnnnnnnnnnnnnnnnnnnnnnnnnnnnnnnnnnnnnnnnnnnnnnnnnnnnnnnnnnnnnnnnnnnnnnnnnnnnnnnnnnnnnnnnnnnnnnnnnnnnnnnnnnnnnnnnnnnnnnnnnnnnnnnnnnnnnnnnnnnnnnnnnnnnnnnnnnnnnnnnnnnnnnnnnnnnnnnnnnnnnnnnnnnnnnnnnnnnnnnnnnnnnnnnnnnnnnnnnnnnnnnnnnnnnnnnnnnnnnnnnnnnnnnnnnnnnnnnnnnnnnnnnnnnnnnnnnnnnnnnnnnnnnnnnnnnnnnnnnnnnnnnnnnnnnnnnnnnnnnnnnnnnnnnnnnnnnnnnnnnnnnnnnnnnnnnnnnnnnnnnnnnnnnnnnnnnnnnnnnnnnnnnnnnnnnnnnnnnnnnnnnnnnnnnnnnnnnnnnnnnnnnnnnnnnnnnnnnnnnnnnnnnnnnnnnnnnnnnnnnnnnnnnnnnnnnnnnnnnnnnnnnnnnnnnnnnnnnnnnnnnnnnnnnnnnnnnnnnnnnnnnnnnnnnnnnnnnnnnnnnnnnnnnnnnnnnnnnnnnnnnnnnnnnnnnnnnnnnnnnnnnnnnnnnnnnnnnnnnnnnnnnnnnnnnnnnnnnnnnnnnnnnnnnnnnnnnnnnnnnnnnnnnnnnnnnnnnnnnnnnnnnnnnnnnnnnnnnnnnnnnnnnnnnnnnnnnnnnnnnnnnnnnnnnnnnnnnnnnnnnnnnnnnnnnnnnnnnnnnnnnnnnnnnnnnnnnnnnnnnnnnnnnnnnnnnnnnnnnnnnnnnnnnnnnnnnnnnnnnnnnnnnnnnnnnnnnnnnnnnnnnnnnnnnnnnnnnnnnnnnnnnnnnnnnnnnnnnnnnnnnnnnnnnnnnnnnnnnnnnnnnnnnnnnnnnnnnnnnnnnnnnnnnnnnnnnnnnnnnnnnnnnnnnnnnnnnnnnnnnnnnnnnnnnnnnnnnnnnnnnnnnnnnnnnnnnnnnnnnnnnnnnnnnnnnnnnnnnnnnnnnnnnnnnnnnnnaaagcgtgaaggcgaaagaggcttcagcaggcgtgaagcccagtgatttaatatagtgcgacaggaatgccagctcgaaaccgtcacccgtcataaagaccgcgatcgccagatatccccatagcaggttcagcggcaatcccagccactgtttatttatttcggacatattgacctcgtttgtagcgtacaggtaagcccacaccggaaatattccggcgtgagttttcttattgtctttttctctaaatatactgacgtgtatttattctctgattactgtcgcagtctgttgtaactgcttataagcctcgtatcgacgcagatgaagggactgaaagttcgcttgcggatagaaatatttatccacgtgggtaaattgtttcatggcatcggtcactgaaggcgctatatttcccgccaccgccccgagaatggccgaacccagtaataccggttcgctgcattgggtcgctaacaccggcagcccgcaggtatctgccagcagctggcggacgaaagggtgctggcccgcgccgccgctgataacgatattttcggtctgtacgccgcattcacgctgggcgtcaatgatttgtcgcaaaccgtaaccgataccacacagaccggccacatacagtgccatcaggttattgatatcgttctccatgcccagcccgcagatcgtggcccgcgcatggggatcggcaaagggcgcgcggttacccagaaattcgggtaccacgtgcagtcctgctgccaggttcaccgcctctgaggcggtggcgaaggtctgtaaaagccggtccgccaggtaaaccggcagcggcaggtctgactcctgtgccagctggcgcgcttgcggtgcggcaggatggaaacttaataaccgatcgatagcggcacccgcggcgctttgtccgccctcaatcagccacagcccaggtaccatcgcgctaaaataaggcccccagacgccgggcacaaaaacggcgctctcggcgctggtcatggtgcacgatgaggtgccaaaaacatacgcgagattgttcagcgcgccgccgccaacgcccaacgtcccgatgccgccagcgtgggcatcaattaaccctaccgccaccggcgtgcctggcagcaagcccatctcacgcgcggcctgctccgttaagccctcgccgcaaggggtgccgggggcggcaatatgctgccctatgcggacaaaatcttctccggctagctcgtccaggccaacggtgcggaaatagtccgggtcccagcgattctcatgggccagccacgtccatttacaggttacggtacagatggaacgggtgagatcgccggtcgcgcgccaggtcaggaaatcggccaaatcgaaaaattgccaggcgcgatcgtagacctctcggtggttttctttcagccacagcagcttgggcgtctccatttcgggcgatattttcccgccaacgtagtccagcaccggatgatgggtggcgttgatgcgctccgcctggtctgtcgcacggtgatccatccagacgatgatattgttttccgcttcaccgtcagggctgaccgccagcggttcgccgtcgtcgtccaacaccaccagcgagcaggtggcgtcaaacccgatgccggcaacgctctgcggagtcgtcccggagcgcgccagcgcctcgcggatgcagcggcaaacggcctgccagatctcggcgctggactgctccacgcggcttccgctgcggtgcacggtggcaattttctgcgtcgcgtgggaaagcagcctgccgctgagatcaaaaatgcccgcgcggacgctgccggagccgacgtctacgccgataacnnnnnnnnnnnnnnnnnnnnnnnnnnnnnnnnnnnnnnnnnnnnnnnnnnnnnnnnnnnnnnnnnnnnnnnnnnnnnnnnnnnnnnnnnnnnnnnnnnnnnnnnnnnnnnnnnnnnnnnnnnnnnnnnnnnnnnnnnnnnnnnnnnnnnnnnnnnnnnnnnnnnnnnnnnnnnnnnnnnnnnnnnnnnnnnnnnnnnnnnnnnnnnnnnnnnnnnnnnnnnnnnnnnnnnnnnnnnnnnnnnnnnnnnnnnnnnnnnnnnnnnnnnnnnnnnnnnnnnnnnnnnnnnnnnnnnnnnnnnnnnnnnnnnnnnnnnnnnnnnnnnnnnnnnnnnnnnnnnnnnnnnnnnnnnnnnnnnnnnnnnnnnnnnnnnnnnnnnnnnnnnnnnnnnnnnnnnnnnnnnnnnnnnnnnnnnnnnnnnnnnnnnnnnnnnnnnnnnnnnnnnnnnnnnnnnnnnnnnnnnnnnnnnnnnnnnnnnnnnnnnnnnnnnnnnnnnnnnnnnnnnnnnnnnnnnnnnnnnnnnnnnnnnnnnnnnnnnnnnnnnnnnnnnnnnnnnnnnnnnnnnnnnnnnnnnnnnnnnnnnnnnnnnnnnnnnnnnnnnnnnnnnnnnnnnnnnnnnnnnnnnnnnnnnnnnnnnnnnnnnnnnnnnnnnnnnnnnnnnnnnnnnnnnnnngtacgcgatcccagacgtccgggtcgccttcagcaaccggcccgccgatgtaggcgcctgcattggcgtggaaaatatccaggccgccggcgaggccgacaatgtcgctcagcatcgcgtcgacttgctcgggtttgaacagatcgatttgcagggcaaacgcgttctcgcccagctcggcgacaaggcgctgaagcttttcgccttcccggtcgattaacaccaccttagcgccagcgccgagcagcgtttttgcacactccaggccaatacctgaggcggcgccagtgatagcagcgactttgccctgaagggaactattcatggaggggacagagtgattcattttataatcctttatgcagagatgatttttagggtgtgtctgctttcgcgtgaagaacgggggttctgactgacgcgtgaagcaaactgctcaatcgatgaagcagatctagcacttgcttatttctccagcaagagacattcaaaatgaagaggcgattttgtgacgcgcgttgagaaaacgaagaaaacgaccatttacgatctggcggaactcaccggcgtttctgccagcgcggtgagtgctattttgaatggcaactggaagaaacgccgcatcagcgccagcctggcagagaaggtaacccgcattgcacaagagcagggctacgcggttaaccgtcaggcaagcctgctgcgcagcaagaaatcgaacgttatcggcatgattgtgccgaaatatgacaaccgctatttcggctctatagcggaaaaattcgaagagatggcgcgtgccagagggctgttgccgattattacctgcacacgccgacagccggaactcgagctggatgccgcccgtgccatgctctcctggcaggttgactgggtcattgccacgggggcgacacacccggacaaaattgctgaactctgtcatcaggcgggcgtacctacgctaaatcttgatctgccgggtaccctggcgccctctatcatttcggataactacggcggcgcgaagatgctgacagagcggatcctcgccagcagctttaaacggtttggttcgctggctccgctgaccttcgttggcggacgccggagtgataacaacaccgcagagcgcctgcgcgggttccttgatgcccatcaggcccatgggctgaccgttccggaacagcagctgctggtcaccgggtactcgtcatcgcgcgtggaggagcagctcagagccaccttcccgtcgccatcgacggcgctaaaggggctgtttgtcaattcgaccatttcgctggagggggtggtacgttggctggcccaatacgggcagaccggccaaaatcagccgccgatgggttgttttgactgggacccatttgtctctctgctgggacatgatatcgacatggtgcgccaggacgtcccggcgatgctggagaaggtatttgaaattctcgattccggtgatacctcggtcaggcgtattgagatcccaccggaactgattggcagccagagcgtcacggcctagccctgacgcgtcagcagccagcgcgcggtctgttcatccgtcaccagaccgtttacccagccgcctttgagggcggcaaggatcgccgggcgtttatcctcgccgcaggcggccgcaatacgtggacactggctctggcgaatatcgtagctggtaataaagcgattaatctggctgtcgatgaccttgccgtcggcatcgataaagcgtccgagtatttcgccaacgccaccgcgctgggtcaactcttccagctgtgcctcatcgataaacccgtctttgaagatagggctctgcctgcccagcgccccgatgccgacaaaaatcacatcggctgcatccgccacggcgcagacgttacggaacaggcggtttgagcaccacatctcatgctcctcgctggactgagcatagcgcggcgccggccactggtaatattttccctgaattttacgcgccagcagcaacggcacatcatcgtaatagttacattgcccgtgctcgttcatggcgctgatcagggcgacacagcgggtgttgtggctgtcaaaatcgatacgcttgatggttttttttagcgtcagtccggagccaattccgacaaccgtgggtttatcaccttgcaggtagcgggccatcagctgataacagccaaacgtcacgctatccagcgcgctttcattgcggtagacgggcacaatgttgcagtgggtcaggtgatatttttccgcgagaagttgcgcataatcgaggcagttagcgacagggtgatgaagcccaatcgagacaatgccttcctctttcgcggcggcaatcagccgctgcaccaccggtcttgatgtgccgagctggctggcaatttcgctttgattaagcccggcgatgtaatacatccatgccgcccgcactttttgatcgagcctgatgtcatcttctttgctcacgtttccctgcctcaagagtggggttgagggcggtcaacacccacaacaattgtctgtcattctggcgggtgctccgcgctgaggcaagcggtttgctctttattggtcatttgttatttgaatggtcatttgttcttttgtgatctgtagctcttattttaatcaaatgatcatatacagttcagccataacctcactggagaacagaacaatgaccgagaaatacacatggctacatattgggctggggtcttttcatcgtgcgcatcaggcgtggtatctgcaccgcctgattgccggcggcgatacgcgctggcacatcgctgcgggcaacatacgcaacgatgctgaacatgtggtgcaggcgctggccgcgcagaaggggcgatatgtactggagaccgtcagcccggaaggcgagagagactatgaagagatcgcctcgattcagacgctgatcccgtggcaggcggatttgcagccgctgattgccgaaggggcgaacccgcagactcgggtcatcgcgtttaccgtgacggaggggggctactatctggataccagccacaggctggatgtggccaatgccgatctggcgagcgatattaagggcggctgtaaaaccatctacgggacaattgcccgcatcctcgaagcgcgtatggcgaacggagcgggtccggtaaccttgcttaactgtgacaacgtgcggcataacggcgagcgcttccacgacgggttgattgaattcttaaccctcagcggcaaacagagggtcatcgactggctgagtgctaatgcgacctgtccgaataccatggtggatcgcatcacaccgcgtccggcggccgatctcccggcgcgcattaaggcccggacgggcatagacgataacgccccggttatgggggaacgctttattcagtgggtggttgaagacaatttccgcgacgttcgtcccgcgctggaaacggtgggcgtggagctggtgggatccgtcatcccttatgaagaggcgaagatccgcatcctcaatgcctcccatagctgtatcgcctgggcgggtactctggtcgggcagcagtatatccacgaaagcacgcagacagaatttatctacaagattgccgaccgctacgtgacggaagatgtcattccctgcctgggagataatggcatcgatctgccagcctaccgcgacgtggtgcttaagcgttttaccaacccctggattcaggacaccaaccagcgcgtcgcggccgacgggttctcgaagatcccggcgatgatcgccccaacgctgcgtgaatgttaccagcgcggcgtacgtcctgacgctaccgctatgctgcctgcgctgttctacgtctatatggagcagtggcatcacggcaagctgccgtatgaataccaggacggtatcctcaacgcctctgcggtacatgcgatgttcgaatcggacgatccgatagcccgatatgccagcgataccgccctgtttggcgatctgaccggccgggaagattttgccgcgcttctgcgtgaaaaaatcgctgacgtctacgcgctgattaagtgagaggtgggtatgtatctgggcatcgatcttggcacatcagaagtaaaggcgctggtcattgacgaaaacaacggcgttgtcgccacccatagcgcgccgctgacgatacagcgtccgaagccgcactggtctgaacaatcgccggaagcctggtgggaggcaaccgaatacctgattgccaccctccgggagaagtgcggccaccactggcaggcgataaaagccattggcctttccggacagatgcacggtgcggtactgctggatgccgcgggtgaacccctgcgtccggccatcctgtggaatgacacccgctgcgcgcaggagtgcgcagagctggaagagatggcgcccgagctgcaccaggtggcggggaacctggcaatgccggggtttacggcaccaaagctgctctgggtgcgccgtcatgagccgcagaacttcagccgtctcgccaccgtgctgctgccgaaggattatctgcgcttcaaaatgaccggaaaaaaaatctctgatatgtcggactcggcagggacgctgtggctggatgtgggaaaacgagactggtcggatgcactgctggaaaaatgtgggctgtcgcgtgccgccatgcctgcgctggtggaagggtgtgaggtctcggcgctactcgaacctgcggtagcgcagcggtggggtctcaacccctcggttatcgttgccggcggcgggggagataacgccgtcagcgcgataggggttggggccgtttcgccgggcgatgcgtttatttcgctgggcacctccggcgtgctgtttgtggtcacagatgcctaccgtccggcaccccagtctgccgtgcacgcgttctgtcacgtgctgccaaacctgtggcatcagatgagcgtgatgttaagcgccgccagttgtctacagtggttttgccgtctggtgggcgtcacggagctggcattgcttgaggagatcgcccagctaagcgatgcggagaaagcgagcgcgccgatgttcctgccgtacctttccggggaacgtacgccgcataacgatccctgtgcacggggcatgttctgggggctaacgcactccagccagcgtgcgctgatggggtatgcggtgctggaaggcgtcagcttcggtattgccgatggccttcgcgtgttgcaggagagcggcacgcagattgaacagtgctccctcgtcggcggcggggcgcggagccccttctgggcccagctgctggccgatattctggcgatgccggtggtgacgcataagggcggcgaaaccggcggtgcgctgggggctgcacggctggcctgtctcgcagccggtaagccgctggcttccgtgtgcgaaaaacctgaagtctataaaacctggcgcagcgatccggcgcgccaccgtgcgctgatgacgcgttaccagcagtttaacgcgctttaccaaaacgacctgaactaccgaaacccataattctgtggcaaagaccctccggcgatgctgccggagcggttccctgtaccctaaaaacgaggtcaatatgtcgttaaataacaaacaatggctgggattacccctgagtctggtctgggggtatatcgctatcgcggtctttatgacgggcgatggtttcgagctggcattcctgtcgcactatattaaggcgctgggcttcacgcctgctgaagcctctttcgccttcacgctctnnnnnnnnnnnnnnnnnnnnnnnnnnnnnnnnnnnnnnnnnnnnnnnnnnnnnnnnnnnnnnnnnnnnnnnnnnnnnnnnnnnnnnnnnnnnnnnnnnnnnnnnnnnnnnnnnnnnnnnnnnnnnnnnnnnnnnnnnnnnnnnnnnnnnnnnnnnnnnnnnnnnnnnnnnnnnnnnnnnnnnnnnnnnnnnnnnnnnnnnnnnnnnnnnnnnnnnnnnnnnnnnnnnnnnnnnnnnnnnnnnnnnnnnnnnnnnnnnnnnnnnnnnnnnnnnnnnnnnnnnnnnnnnnnnnnnnnnnnnnnnnnnnnnnnnnnnnnnnnnnnnnnnnnnnnnnnnnnnnnnnnnnnnnnnnnnnnnnnnnnnnnnnnnnnnnnnnnnnnnnnnnnnnnnnnnnnnnnnnnnnnnnnnnnnnnnnnnnnnnnnnnnnnnnnnnnnnnnnnnnnnnnnnnnnnnnnnnnnnnnnnnnnnnnnnnnnnnnnnnnnnnnnnnnnnnnnnnnnnnnnnnnnnnnnnnnnnnnnnnnnnnnnnnnnnnnnnnnnnnnnnnnnnnnnnnnnnnnnnnnnnnnnnnnnnnnnnnnnnnnnnnnnnnnnnnnnnnnnnnnnnnnnnnnnnnnnnnnnnnnnnnnnnnnnnnnnnnnnnnnnnnnnnnnnnnnnnnnnnnnnnnnnnnnnnnnnnnnnnnnnnnnnnnnnnnnnnnnnnnnnnnnnnnnnnnnnnnnnnnnnnnnnnnnnnnnnnnnnnnnnnnnnnnnnnnnnnnnnnnnnnnnnnnnnnnnnnnnnnnnnnnnnnnnnnnnnnnnnnnnnnnnnnnnnnnnnnnnnnnnnnnnnnnnnnnnnnnnnnnnnnnnnnnnnnnnnnnnnnnnnnnnnnnnnnnnnnnnnnnnnnnnnnnnnnnnnnnnnnnnnnnnnnnnnnntgcctacacggcgctgtatgtcgtggccttcatcctgtgtccgtttattcgggttgaacagcctgggtttgttcgtcaggaaacctgtaagggtgaaacggtcggaatttcgtaatttattcaggcctgacggcatcgccgggccattcacggagacgtatgatggatgttaaggcggtaatttttgacatggatggcgtcatcattgactccgaaggcctgtggcgtcaggcgcagaaagcagctctggcaggctggcgtgctgaagtcagcgacgaagagtgtgagtcactgacgaaaggcaagcggctggatgagattgcccggacctggtgcgaatactgcaaacttgaggccgatcctgaaatgattgaagcggccattcgtctgcgcatcatcgaactgattggccgggaaggcaaagcgatagagggcatctacgacgtgatgtcgtattttcgtgaggcaggttaccggattgcacttgccacctcttcgtcgcatgaaatcgtgcatgcggtgcttaagaaactcaggatgggtcactattttgaggtcatttgcagcgccgacgatgaacgctacggaaaaccgcaccctgccgtctatctctcggcgctgcgaaaattaggcctgacggcctcgcagtgcatagtgattgaggacagccagagcggctaccgtgccgcccttagtgcggggctcaaaaccctcatcgtctcgccagcgtgccatcatgccagctttaacaatgccagtggccggtatgcgtctatgcatgcgctgctggaaacgcttgccgttccagccccggaagcgggttagttgactgatttgtaagcgcagaagtttccgcgggttgttgccggtcagcatattcctgcttctgcgcttaccttcaaataacgtctcccgatcaacctcacatttccccgcgcttttgtgaaaattgtcacgtccgaccgtgcatatgcccaaaaaatagcctctccttaacgcgttttgtccgaggacgtgctgattttttatgcttaaattacatactgaaacgcatttttaaaatcataaaacccctttgtcattttctgcttctgggcttatcgccggacttaaggaccgataatgaaaattgaatctgtaaacgtcaccgtttttcagtacccgacgcgtcgggtctctgacgccgcggggcattcgcatcctgggccggagagcatggccaaaatggcaatgctgaccatcacggcagaagagggcacccgcggatattcgttcgcgccgccggaagtggtgcgcccctttgtggtcaataccttctttcgcaaagtgctggtggggcaggacgcattcaaccgggaacgcatctggcaggatctggcgcactggcagcggggaagcgcgcatcagctgaccgagcgtgcgctgggcttcgttgaacaggcgctgtgggatctgattggccgtaagctcaacctgccggtctggaaactgcttggcggctatcgcgataaggtgccggcctatggcagcaccatgtgcggcgacgatctgccaggcggattatccacgccagaggagtacgccagctttgccgaaaagctggtggcgcgcggttacaaggccatcaagctgcacacctggatgccgccggtctctttcgcccccaatccaaagatggacgtcaaagcctgtgccgccgtgcgtgaagcggttggcccggacattgacctcatgattgacggctaccactggtacagccgtaccgaggcgctgtacatcggcaaagcgctggaaaagcttgacttcgcctggtttgaagagccgatggaagaggagagcatggcctcctacgcgtggctggcggagaacctctcgattccggttatcgggccggaaagcctgggcggaaagcaccacagccgtgctgactggatcaaagccggggcctgcgacatcctgcgcgcagggtcgaacggcgtgggcggcatttccccaacgctgaaggtggcgaacctggcggaatcttttggcatggactgcgaaatacacggcaacggcgcggccagcctggcggtgattggcgccatcaaaaactgccgctggtacgagcgcggcctgctgcacccgttcctcgactacgaccaaccggcggcgtacctcaacagcctggtggaccctatggacgaaaacggcatggtcagtctgccgacccgcccgggactgggcgaagacattaattttgcatatatcgaagccaataccgtcagccacgactgacagataaaaacgtaccctacaggcgatatatacatgaaacgatctcccttagccggggcgtgcttgctcgcgctctcgctgatgatggggagcggtgcggcgtacgcgaaaacgccgcccgaccagctcatcatcggcatgaacatgaataacctgctgaccctcgatccggcggcaatgaccggtaacgaagtggtcggcattgtggtcaatctctacgactcgctggtggagctggacccgaacgcgctcaccaacgtcaggcccgcgctggcgaagtcctggaatatttcgccggaccgtaaaaccctgacctttcacctgcgtgacgacgttaaattccactctggcaacccgctcacggcggaggatgtggtctggtcgatgcgccgtctgctgcacctcaaccttgcccaggcctcggtgtggaagtcgtatggattttctaagcaaaacatcgacagccaaatcagcgccaccgatgcctacacggtgcaaattgttctgcctaagcctaacgatccgcagctggtgatctactccctcggcgcgctcggcaacctcggcgtgctcgacagcaaaacggtgcagcagcacgcggtgaataacgactggggcaaccgctggcttaccaccaacgaagcgggttccggcccgtttatgctggaaacctggcaggcgaaggatgtgctgcgcatgcagcgcaacccgcaatactggcgggaagaacccaaaatgagccgggtggtgctgcgtcatttccaggagtcacaaaccctgcgcctgatgattgagaaaggcgacctcgacgttgccaacaacatggcggtggcggacattaacgccctgcgcaaagacccgcagctcaccgtcgaagccgtgcagaaaggcacggtgtactacgtggcgatgagcatgaaagaggcccatttcgctaacccgaaggtgcgcgaagcggtgcgctatctgattgactatcagggcatcaacagcgcgctgatgccgggctacggcgtgctgcaccagcgcccgatcaaggcgggtatgccgtccacgctgccggacccgggctataggctcgatatcccgcgcgccagaaagctgctggcggaggcgggctacccggacgggtttgacaccaccctgcgggtgctggcggatcagccgttcctcaatatcgccatcgccgtgcagtcgacgctgatgcaggcgggcatcaacgccaaaatcatcaccggcaccgggaaccagatttacggcgcaatgcgcgagcgcaagttcgacatgctggtggggcgcggcggtagcggcgtcgaaccccatccgcactccagcctgcgggcgttggtctataacccggacaacagcgatgaagcccgtctgaccaacttccagggctggcgtaccagcttctacgacaagccgctcaacgaaatgatcgacaaggccctgctggagcgcgatccggaaaaacagatcgccgattaccagcagatccaggtccgctacgacgcgctgatcccggcgatggttcctctgtcgcagatggttgattcggtggtggtgcgtaacgaggtgaagaacttccagtcgcacccgtcggccaccaccttcctgcgcgacgtctacaaaaccggaggtgacaaatgagtgtggcaattctcgcgcccggctcacggacccggcgcttctcaaagcggttaacgcaggtggtggtgacgctgttcggtctgctgctgctgacctttttcatcggccgcgtaatgcccgtcgatccggtgctggcgattgtcggaccggatgccgaccacagcacctatcagcaggtctatcaccagctgggattcgaccggtcgctgctggctcagttcggtatttacctcaataacctgctgcacggcgatctgggcaatgccctgctgacgggtaaaccggtgactgccgatattctgcgcgtcttcccggcgacgctcgagctggcgacgatgnnnnnnnnnnnnnnnnnnnnnnnnnnnnnnnnnnnnnnnnnnnnnnnnnnnnnnnnnnnnnnnnnnnnnnnnnnnnnnnnnnnnnnnnnnnnnnnnnnnnnnnnnnnnnnnnnnnnnnnnnnnnnnnnnnnnnnnnnnnnnnnnnnnnnnnnnnnnnnnnnnnnnnnnnnnnnnnnnnnnnnnnnnnnnnnnnnnnnnnnnnnnnnnnnnnnnnnnnnnnnnnnnnnnnnnnnnnnnnnnnnnnnnnnnnnnnnnnnnnnnnnnnnnnnnnnnnnnnnnnnnnnnnnnnnnnnnnnnnnnnnnnnnnnnnnnnnnnnnnnnnnnnnnnnnnnnnnnnnnnnnnnnnnnnnnnnnnnnnnnnnnnnnnnnnnnnnnnnnnnnnnnnnnnnntgcggtctggcattccgctgggcgtactggcggcggcgcggcgcaacagcgtttccgactacgtggtgcgcatcatcagtctggcgggttattccacgccgattttctgggtcgggatgatggggctgctgctgttctacgcctggcttggctgggtgggaggcgcgggacgtctggatctcggactggagggggtagtcccacgccgcaccggactgatgacggtggatgcgctgctggccgggaacggcgcggtgttctggaacgccattaaccatctggttttgcccgcgtcgctgctcggcttccactcgctggcctacatcagccgcatgacccgcagctttatgctggcgcagctgtcgcaggagttcattatcactgcccgggtgaagggattaactgaacgtcaggtgatctggaatcacgcgtttcgcaacattctcgtgcagctcctgacggtagtggcgctggcctacggctcgctgctggagggggcggtgctgattgaaaccgtcttctcctggccgggcttcggttcgtatctcaccggcagcctgctgctcggggatatgaacgcggtcatgggctgcgtgctgctggtgggggtcatcttcgtgatgctgaacctgctctccgacatgctgtatcaactctttgacccgaggacgaaatcatgaccgtttctctggattcgccgctggggaccgggccatccgaacgccgccagcgtatcagacgcacgctgggccgcgccgcgggcttcgtcggcaagatggcgcgcaatccgctcaccgccatcggcggcgggattatcctgctgctgctgattgtggcggcgtttgccccgctgatcgcgccgtacaacccgctggtgcaggacctcaataacgcgctggtcgccccgaacgcactgcactggttcggcaccgacgagtttggccgggacatcttcagccggctggtgtacggcgcgcgcatcacgctctacatcgtgctgctggtctccgtgaccgttggcccgctggggctgctgctgggcgtgaccgcaggctacttcggcggcagggtggacgcggtgctgatgcgcgtcaccgatatctttatctccttcccgagcctggtgctggcgctggcgtttgtcgcggcgctcgggccggggctggagcacgtggtgattgcgattacgctcaccgcctggccgccgattgcccgtctggcgcgcgccgaaaccctctctctgcgccaggccgattttatctccgccgtgcggcttcagggtgcttccccggtgcgcgtactgtggcgtcacattgtcccgctgtgcctgccgtcagtgattatccgcatcaccatgaacatggcggggatcattctcaccgccgccgggctgggctttcttggccttggcgcacagccgccggagccggagtggggagcgatgatctccagcggtcgtacctacatgatggagtgctggtgggtggtgactattccggggctggcgatcctgatcaacagtctggcgttcaacttcttaggagatggcctgcgtgacatcctcgatcctcgtagcgaataacccgatgctcgacgtgcgcgatctccacgtcgattttatcaacggcggcgcggtcacccacgcggtgcgcggcgtctctttccagctcggacgcgaaaagctggcgattgtcggtgaatccggttccggtaaatccaccgtcgggcgggcgctgctacgcctgcatccggccaaagcgcagatccgcgccgcgcggatgcagtttggcgatgtcgatttacgggccgtcagcgaggcgcagatgcgcggcattcgcggcaagcgcatctcgatgatcatgcaggacccgaaatactcccttaacccggtggtgtgcgtgggcgaccaaattgccgaagcctggctgacccatcatccggggcgcaaggcggaagccaaagccagagtgctggagatgctcgacgtggtgcgcattcgccagccggagcgggtgtatcacctctgtccgcacgagatttccggcgggcaggggcaacgcatcatgatcgccatgatgctgatcgccgatcccgagctggtcattgccgacgagccgacttcggcgctggacgtgtcggtgcgtttgcaggtgctgggcctgctcgacgacctggtgcagtcccgcggtctggggctgatctttatcagccacgacatcaacctggtgcgcagcttctgcgaccgggtgctggtgatgtacgtcggacgggtggtggagtcgattgccgcgaaggatctgcacaacgccaggcatccctacacccaggggctcatcagcgcgctaccggaaatcaaccatcgccgaccgacgctgccggtattacagcgtcaggccagctggctcaccgagtaaggagcagagatgatcgagatacaacaccttaacctgacgtttggcgagggcgagaagcgtaatcaggtgctggacgatgtgaatatcagcgtgagggacggcgagatttacggcctggtgggggagtccggttcgnnnnnnnnnnnnnnnnnnnnnnnnnnnnnnnnnnnnnnnnnnnnnnnnnnnnnnnnnnnnnnnnnnnnnnnnnnnnnnnnnnnnnnnnnnnnnnnnnnnnnnnnnnnnnnnnnnnnnnnnnnnnnnnnnnnnnnnnnnnnnnnnnnnnnnnnnnnnnnnnnnnnnnnnnnnnnnnnnnnnnnnnnnnnnnnnnnnnnnnnnnnnnnnnnnnnnnnnnnnnnnnnnnnnnnnnnnnnnnnnnnnnnnnnnnnnnnnnnnnnnnnnnnnnnnnnnnnnnnnnnnnnnnnnnnnnnnnnnnnnnnnnnnnnnnnnnnnnnnnnnnnnnnnnnnnnnnnnnnnnnntgctgaaatgccttgccgggctgtttacccactgggagggcgagctggcgattaacggcaagcggctggaaaaacgtatcagccaggaacgctgccgccgggtgcagatggtatttcaggatccgtacggctctttgcatccgcgtcacaccatcggcgatattctggaagagccgctgcacattcaccgcataaaaaatcgggagcggcgcgttcacgccctgctggataaagttgggcttagccgggcgtttcgcgatcgctatccgcaccagctttccggcgggcagcgccagcgcgtggcgattgccagggcgctgattctggagccgcaggtgctgctgctggatgaacctacctcggcgctggacgtctcggtacaggcggaaatcctcaacctgctggcggaacttcagcgtgagtcgaacctgacctacctgatggtcacccacgatctgggcgtgattgcccatctgtgtcagaaggtggcggtaatgcagtatggcaaaatccttgaaagcctgacggtggacgaactggtcgccgggcaggccaaaaccgactatacgcggatgctggtcaatgcctcacagcagtattcccgcgagatggcgcgggaggtggcggtgtattaggtagccgggtggcggctacgcgatcggtcctgtaggccgggtaaggcgtagccgccacccggcaaaccatcagcgcaagagctgacaatctggcggtaatcggcactgcaacgcgcccggaaccacttcgatgcggaatttctctccgctcagcggttcgccatcaaggttaaaggtcatgccgtgtggggcgatcacttcaaaccacgcggatttcccggcgataatattggggctctcctctggctgcgtcagcgtcgtaaacagcgcgggcagcagcccgtcgccagtaaaaatgcgcagctgtagctgaccatcattaatcagggcttccgggcaaagctgctgtccgccgcctgcctgacgtccgttgccgataccaatcaccagcgcgtcgccctgccagtggaagttctcaccgtggatttcacagctgtcgggtttgagggtgtccatgcgcatcagaccgtgaatgaggtacgagacgccgcccagcgcggctttcagcttctccggcgtttcgctggtgatccgcgtgccgaaaccgcccgtagccatgttgataaagcaggttctttcattcacctgtgcaatgtcgacggcggtcgctttcccgaggatagccagttgcagtgctttgcctaaatcctcaggtatgccggcgctggtggcaaaatcattggcggtaccgagcggtaaaatgcccatcaccgggcgatgtgctgtgttgaggtcaataagcgcaccagcgatctcgttgattgttccgtcgccgccgcctgaaatgatggtctcagcacctaacctgatgccttcgtcgatatagcgtgccgcatcgcctttttcaaaggtcacccgcacgtgaatgcgcgcgccatcttcacgcaattcggtgatcgcctggcgcaacagatcgttgcctgcacttttgccattgagaattaataaactgtctggataggatgccatccgggttgctcccttttttaactatagaaagagtgtatcccagagaaggaaaaagcgggtaagaacaggatgaaaggcaaaaaataagcccgcgtaagggagattacgcaggctaaggaggtggttcctggtacagctagcatttatgggttatgtttttcagcggggggataatacccgtattgaacgaagcggtatgtgatccgattctaagaattatcccagcgtgaaaaaatcccgttgattgactatttgccgtgtggatttcgggtattttcaccttcaaaattacgcatcagcagtgcaaactccagctctacctcttcaggaaccggcagccagaccacatggccgtcgccaggagcgacctctatcgcctcaccttttttgttttccaggtgctcgaggcggaagttcatgttgccctgaggcgtcatcagctccaggctgtcgcctttagtgaatttgttttttacggcgacggcggccagcggacctttacgttcgccggtgaagtcgcctacaaactgctggcgttcggaaatcgagtagccatgctcgtagttctggtagtcgtcgtgggtgtgacggcgcaggaaaccttcggtatagccgcgatgcgccagaccttccagcgtttccagcaggctggtgtcgaacggtttaccggcggcggcatcgtcgatggctttgcgatacacctgtgcggtacgggcgcagtagtagtaagacttggtgcggccttcgattttcagggagtgtacgcccatctgggttaaacgctcgacgtgtgcgatggcgcgcagatctttggagttcatgatgtaggtgccatgctcgtcttcgaaggcggtcatgtattcgcccggacgtttggcttcttcgatcataaacacgctgtcggtaggcgcgccgatacccagcgttggctcaacgttggtgaccgggatcggctcgtgtttgtgcacgatattgccgatgtcatcttctttgccttcctgaacgttatattcccagcggcaggcgttggtgcaggtgccctggttcgggtcacgcttgttgatgtagccagagagcaggcagcggccggagtaggccatgcacagcgcgccgtgaacgaagatttcgatctccatatccggcacctgggtgcggatctcttcgatctcttcgagggacagctcgcgggacagaatgacgcgggtcagccccatctgtttccagaatttcaccgttgcccagttgacggcgttagcctgcaccgagaggtgaatgtccatctccgggaagttctcccgaaccagcatgattaaacccgggtccgacatgatcagcgcgttcggccccatctccacgaccggcttcaggtcgcgaatgaacgttttcagcttagcgttgtgcggcgcgatgttcaccaccacgtagaattttttgcccagggcatgcgcttcattgatgccgagctgaagattctcgtggttgaattcgttgttacgcacgcgcagcgagtagcgcggctggcccgcgtaaacggcgtcggcaccataggcgaaagcgtaacgcatattttgcagcgttcccgccggggaaaggagttccggtttaaacatgtttgttctcgttctgatgacaggtcagatccgcgtgcacctggtgcagcggtaaggggagatcccccactttaagggcgtgcattgtagcgctgcggggcggggaggtaaagcgcctcacccctttcagatgacataatacttcgtatctttaaaccattagcgatatgacatacaaacacaaatatattaaagcaagtagaataataccggcgataagaatgaaaccaatggcattcatcgtagccgttccagaatacttgactgtccagatggcaactgttcgaatgttatgcagtatttttgtgatcatatagctgatgaaaacaataagcagcgtcaattgcgtaaacatggaaaggtaaaacatgatagcctgcggaatgaagtagttagatattgccccttttgaggtaaagataatcatggtttcgttatcgatgaaatccagtgaagaccgtatcacttccagcgggttccatgtcattacaggtctgtcttcaaaatacaggccttgctggatatagaggtcctcaatcgaagcatttttaagatgggtgacgataagtgtaaatgagagcataacgcccagaacaattgaagaaaaataaacgatcgattttacagacgaaaaccctttcgatagacctgcgttaatgtaagctctgataagataaattgacatcacatcaagcagtaaagagtaccaaaagccaaaatgaataaagtcatgtaatgcaactttaatggtcaatggcagatgttgaggaatgatgtgctcaggatttctaaaagtcagcacccagagataccaaactacaaataagatactggaatataaaatcaataaaaatggtatggtaattaattgcctttttgagaatgcatgattaccgaatgccaggaaaaaagcgcttacccattgctcggaaaacttggttattctgttttttttaggtatgaggagttctattttttgtattgcttttgttttcatttttttattataagcaaataaccccaagaaaaggctggcaacgcttatagctgtggtgatgataatgaataaattaccaataacattttgcatttcttgaagccgtaatattgtgatttatttcgtttttaacatcaaacattacaatttgcaattgtcaaatcaggtaggggtgttgttagaaagtgaatgttatgaagaacgatgattacctgggcaggtaatcatcgttaaagcaaatattaagcaatcctgcacgcatccgcttcccagcgataacccacgccgtacacagcgcgaataaacgactggtcggcgtcgagcgcctccagcttgcggcgcaggtttttgatgtggctgtcgatggtgcggtcggtcaccacgcggtaatcgtcatacagatggttgagcagctgctcgcgggaaaacacttttcccggctcgtgggagagcgttttcagcaggcggaactccgctggggtaagatccaatagtttgctgcgccagctcgcctggaagcggctttcgtcgacaatcagcgggctttgcgcatccagcacctgcaattcacgctgtggcttacagcggcggaggatggttttcaccctagcgaccacctcccgcgggctgtaaggcttgcagatgtaatcgtcggcgccgatttcgagccccagcagacggtcgatctcttcgattttggccgtcaccatcacgatgggaacatcggagaaacgacgaatttcccggcacagggtcaggccgtcggtacccggcagcatcagatccagcaggatcagatccggcggcgtctggcgcacgtagggcagcacctggtcgccgtggctgataagcgttggcgcgtaacttgcggcacgcaaatagtcgatcagcagttgcccaagtttaggctcgtcttctacgatcaaaatacgcggtgtgttgtcgtcaatcggtaactcggtcatgcttccctcgataaatcccgttccagaggtaactctactgtaatgctaaccccgccaaaaggcgaatgggcggcgcggatggtgccgccgtgggcctcaacaatgttaacgcaaatcgccagcccaaggccggaaccgccgctggcgcggttgcgtgaaccttcggtgcgatagaagcgctcgaacagtttttccagctgcgcatctttcacgccaggggcggagtccgcaaaggtcagggcaaagcgcccgttttcctgcctgccggagatatgcagcgcgccgccgccgtcggtgtagcggaggctgttctccagcaaattattgaacagctgcatcaggcgatctctgtcgccaaataccaccgcgctgtccggcagcgagaggttgattttcaggtcacggctggcgaagcgctcgcggaatgcgccggtcacgacttcaaggatattgatcacgtcgactggggctttctggtaggccagggcgccttcgtcggacatggaaagctgatgcagatcgtccaccagtttggtcagcgtgccgacttccgcctgaagcgaggccacggactcgggggtgaactgccgcacgccgtcctgaattgcctccagctcgccgcgcagcaccgccagcggggtgcgcagctcgtgcgaaatgtcggccataaaatcgcggcgcatttgctggtttttttccagcgtgctggcgagctggttgaagtcctgcgccagcttgcccagttcatcctggctgcgggtgtcaacgcgggtcgagaaatcacccgccgccagcttgtgcgtgccttccaccaggcgcttaaccggcgccagcaggccgcgcgccagcgggaaggtggcgagcgccgcaagcagggtagaaagcgcgacaatcagccagctggtctgacgctgctggcggtcaaagttgatgtcggtgttgcgcgtcagccgctcgaccggcgaggcgataacccagcccaccgtggcgccgttcgaggtgatggcgcgctttgtaccgtccggcggtaccggagagcgtgggccaacgagcacgcgcatttcctgatctatcacccagaactgggtgcgccagccgtgcggcggcatgcccggccccgggcggtcgtcgtcattatcgtgctccagcgagcgcaggatttgaaacacaaagcgatcgttattgcgcagaaaacgccagttaccgtgcaggctatactgttcgcccagcgcgtcgcttaagccctgtagtcgctgttcgttaccgtgcttaatgtagtcaataaagccgcgctcaaagctgacccgcaccgcccagtgcatggtaatcagcaggacgatacaggtggcgaaaatcgccacaaaaagcttaccggtgatccccggacgccagaatttcatggtgcactccttttgccgcgtcggatcacgacgtttttggtcgtgtcattcggtactctgacaaagataaaagcgggcagggcgataattaccgccatgctgaggtaagtgtataaaaatacctgatgcgcgacgggggtgtcggcgctgagatggtgctgcccgtacatgccgagcagcaatccggcgaccgtgacccccacgctcatggagagctgcatgatcatcgacagcaggctgttaccgctgctcgccagctcgtccggcagatctttcagcgtcagggtgttcatcgacgagaagcgcatggagttgatgatcccctggcagaacagcaccagcggcaggatgtagtaccagcccagcagcgccacggccataaacagcaggcaaaccaacgccagcccgatcgtggcggtcaccagcacccggcgatagccaaagcggttcaccacctgcaccacaatacgcttcatccccatgctgccgagcaccatcgggatcatcatcagcccggcgtggaacggcgagaagcccatcccaatctgtaaaaacaccggcgtcataaacggcaacatgccgctgccgatgcgtccggcaaagctgccgaacagaccaagacggtaggtgggatttctgaacagattcaggctgaacagcgcgttagcgttgcctctggcatgccacagataccagagaatcgcggtgatccccagcgccaccagcagggcgagcgacagggaggagatccccagccctttttgcccgtcgagggccagggtgagcgtcgccatgccagccgccagcaggataaagccaacgaaatcaaagcgccgggtctgcattttatagttcggcatcagcgtcagggtggcaatcgcgccgataataccgaccggcaggttgatcaggaagatccagtgccaggaggcatactccaccagaatcccgcccagcgccgggccaagcagcgggccgacctgaccgggcagggtgacgaaggtcatcgccgccatatactgcgcgcgcggaacaattttcatcaccgttaaccgcccgacgggcaccatcatcgcgccgccgacgccctgtagcacgcgcgccatcaccagctggtcgagggtattggcctgggcgcaaaacagcgacccggtggtaaacagcacaatggcggtgaagaagatgtttcgcacaccgactttatccgccagccagccgctggcgggcagcatcacggcgaccgtcagcacgtaggcgacaatcaccatatgcatgtgcagcgggctctcccccaggcttttcgccattgaggggagggcggtgttcacgatggtcgtgtccagcgactgcataaagaagccgaacgcgacgatccacaattgccagcgaacgttactgggtaggtcggtcatttactcggtcaccgtggttctctttttacgcgaaaaacgcagccgcagtcggtcaaagaacagatagactaccggcgtggtgtagagcgtcagcagctggctcatcaccaggccgccgacaatcgtgatccccagcggctggcgcagttcagagccgtcaccgccggatataaccagcggtagcgcaccgaacagcgcggccagcgtggtcatcatgatcgggcgaaaacgcagcagacaggcctggaatatcgcctcgtccggcgtcaggttgccgttacgctgggcgtccagggcaaagtcgaccatcataatcgcgtttttcttcacaatacctattaatagcatgatcccgatgagcgcgattaggctgaacggggcaccgaacagctccagcgccagcagcgcccccacgcccgcagaaggcagcgtggagagaatggtcaacgggtgcacatagctttcgtacagcacgcccagcacgatataaaccgtggcaatagccgccagaatcaaaatgacctgcgagttcatggtgtcctggaacacctgcgccgtaccggcaaagctgccgcgcacggaggagggcaccccgagctgggtcatggcgcggttgatggcgtcgctggcctcagacagcgacgagccggttggcaggttaaacgacacggtcgaggcggcggaaagcccctggtggttcaccgacagcggcgcgttcgacggctgccagctggcgaagtacgacagcgggatcgccttgccgtcattattgatcacaaacatcttgtccagcgcgctgatgtcctgggtgtagcgcggatcaacttccatcaccaccttgtactggttcatcggctgatagatggtggagacttcacgctgcccgaaggcgttgttaagcaggctgttggccgcttcaacgttaatgcccaggcgggacatggtttcgcgatcgtaggtgagcgccatctccgcgccgttattctggctgtcggagttcacgtccgccagctgcggcagcgcggccagcgctttacggatcttcggctcccattcgcgcagggcggctaagtcatccgagagcagggtgtactgatagctggcgttagcctgtcgtccgccgacgcgaatatcctgaacggccatcaaaaacagatttgcccccggctctttggcaagcttcagccgcaggcggtcaatgatctgctgcgccgtttcgtgacgttcaccgcgcggcttaagggtaataaacatcatcccgctgttaacgcgtgagccgccggtaaagccggtgacgttatccacggccggatcttcccggatgattttcataaagtcttgcagtttgccccgcatcgcctggaacgaaatactctggtccgcctgaataccgcccatcagcacgccggtatcctgctccgggaagaaggttttcgggatggtgatatacatccagacgttgagcacaatggtgccgatcagcaccagcccgacaagacgcgtgtggttcagcacccatttcagcgatttgccatagcctgactgcatcgccatcaggacgcggccaaagcctttcctgcgcggctgcgagtgaggttggctgcgctttagcatccagccgcacatcatcggcgtcagcgtcagcgaaatcaccagggagataccgatggcgacggaaagcgtgacggcaaattcgcgcagcagtcgccccggcaggccgcccatcagcagcagcggcaggaacaccgccaccagcgacaggctcatggacaggaccgtgaatcccacttcgcgcgtcccctgaagcgccgcctggagcggcttcatgcccgcttccagatggcgcgagatattctccagcaccacgatggcgtcgtccactacaaacccggtggcaatcgtcagcgccatcagcgacaggttgttaagactaaagccgcacaggtacatggcggcaaaggtgcctatcagcgataccggaaccgccaccgccgggatcagcgtggcgcgccccgagcgcaggaacaggaacaccaccaggatcaccagcgcgacggagatgatcagcgtttgctctacctcctcaagcgaggcgcggatggtaggggagcggtcctgcgcaatctggaggtcgatggccgccggaatcgtttcctgaagctccggcaggcgcgcgcggatgctgttcaccgtctggatgatgttggcttctggcagtttgcggatcatcagcaaaatcgccggtttggcgttagtcatcccggcgttacgcacgtcctgcaccgaatcggtgacgctggcgacgtcgctcaggcgcaccgccgcaccgttgttgtagtgaataatcaacggctgatactcggcggcggttttcagctcgtcgttggtctggatctgccagcggtggctgttgtcctcaatcgcgccctgcggcttacgcacgttggcgttgctgatggcggaacgcacgtcgtccagcgatacgccctggttaaacagcgcctgcggattcagccccacgcgcacggcgggcagagagctgccgccgacgtccacgtcgcccacgccgtcaatctgggcgatggtttgcgccagctgggtggaggcaaaatcgtacagctcgccctgggagtaggtctctgacgtgagcgtcaggatcatgatcggcgcgtcggacgggttagccttgcggtaggttggacggctcggcatgccgcttggcagcaggctttgggcggcgtttatcgcggcctgcacgtcacgcgccgcgccgttgatgtcccggtcgaagttaaattccagaatgatgcgcgtgctgcccagcgaactgctggaggtcatctcgttaaccccggcaattcgcccaagcgagcgctcaagcggcgtcgccaccgatgacgccatggtttccggcgaggcacccggcagcgaggcgctgaccatgatcaccgggaaatcgacctgcggcagcggggccaccggcagcagccggaagcccagcacgccgcacagggtaatagcgacggagagtaaaatcgtcgccaccggacggtaaatgaagagggcgaaaaacttcacttacgcctcctcttcacgtttcgggaagcggtttttcgtccacagggccagacggtcaaacagcaggtagataaccggcgtggtaaacagagtcagcacctggctcaccagcaggccgcccaccatcccgatgcccagcggacggcgcagttcggcccccacgccggtgctcagcatcagcggcagcgcgcccagcagggcggcgagggtggtcatcaggatcggacgaaaacgcagcagacaggcctggtaaatggcctcgcgcggcgccataccctgctcgcgctcggcggccagcgcaaagtcgatcatcatgatggcgtttttcttcacaatgccgataagcaggatgatgccgatgatcgcaatgacgtccagctcgctccccgccagcatcagcgccagcagcgcccccacgcccgccgtcggcagggtggagaggatggtgattgggtggataaagctttcatacagcacgccaagcacgatatacatcgccaccaccgccgcgacaatcagccagacggtgctgcccagcgcggcctggaacgccagcgtactgccctggaactgggtctgaatatcggacgggaagctgagttctttctccgcgcccagaatggcctccaccgcttcgcccagggaatacccgtccggcacgttgaaggaaatggtggtggacgggaactgatcgagatggttaatcgacagtggggtgtggcgctcttccacgctggcaatggcgctgagcggcacaatcccgnnnnnnnnnnnnnnnnnnnnnnnnnnnnnnnnnnnnnnnnnnnnnnnnnnnnnnnnnnnnnnnnnnnnnnnnnnnnnnnnnnnnnnnnnnnnnnnnnnnnnnnnnnnnnnnnnnnnnnnnnnnnnnnnnnnnnnnnnnnnnnnnnnnnnnnnnnnnnnnnnnnnnnnnnnnnnnnnnnnnnnnnnnnnnnnnnnnnnnnnnnnnnnnnnnnnnnnnnnnnnnnnnnnnnnnnnnnnnnnnnnnnnnnnnnnnnnnnnnnnnnnnnnnnnnnnnnnnnnnnnnnnnnnnnnnnnnnnnnnnnnnnnnnnnnnnnnnnnnnnnnnnnnnnnnnnnnnnnnnnnnnnnnnnnnnnnnnnnnnnnnnnnnnnnnnnnnnnnnnnnnnngtgtccagcgcggccagacccgggcgtagttttcggtgttatgttccagcaccacgcgatactggttggcctgggtatagatggtggagatcaggcgctggccaaaggcgttatacagggcgttatccacgtcggacatggtaatgcccagacggctggcggtgtcgcggttgacgttcacgtacgccgccagccctttatcctgccagtcgctgctgacgtcagaaacctgcggcagtgttttcagcttgtccaccagctgcggcacccaggtgctcagtgcctcaagcgaggtggcctggagcgtaaactggtactgcgtgcggctcacctgcgtatcaatggttaaatcctggatcggttgcagatacagctcaatgcccggcacgcgcgccaccgcgctttgcaggcgttcaatcaccgcgttaacgcgatcgtcgcggtcatcgagcggtttaaggttaatttgcaggcgcgcgctgttgagcgacgggttggtgccgtccacgcccacgtaggcagtcaggctttccacggccggatctttcatgatgatctcagacacctgctgctggcgctgcgccatgttggcgaaggagaccgtctgcggcgcctgaagcgtgccctgaataatgccgttgtcctgaatcgggaagaagcctttcggaatgaaaatccacagcatgacgctgagcgccagggtgccgagcgccacgccgagcgttgcccacggatggttcagcactttcgccagcacgcggccgtaggcggcaataatgcgctcgaacatccgctcggaggcgcgcgagaagcggttttgcttgcgcagggactcgtggctcagcatgcgggcgcacatcatcggcgtcagcgtcagcgacaccacggcagagatcagaatggcgaccgccagcgtcacggcaaactcgcggaacagccgcccgacgatatcgcccataaacagcagcgggatcagcaccgcaatcagcgagaaggtgagcgagataatggtaaagccgatcctcccccgcgcccttcagcgcggcggctaacggcttttcacctttttcgatatagcgcgagatgttctcgattaccacgatggcgtcgtccaccacaaacccggtggcgatggtgagcgccatcagcgtcaggttgttaatcgagaagtcgaggaacaccatcaccgcgaacgttccgaccagcgagagcggcacggcgacggcgggaatgatggttgccgggacgttgcgcaggaacaggtagatgatcatcaccaccagcgcaatcgccagcatcagctcgaactgggtgtcggtcactgacgcgcgaatattcgtggtgcggtcagagagcactttcacgctgaccgattttggcaggctttccaccagctgcggcagcatggtgcgaatgctgtcggcggtatcaataatgttcgcgcccggctggcgctgaacgttcatgacaatcgcctgctgcttattggcccacgccccgagccagctgttttccgcgccttgttcaacggttgccacgtcgcccaggcggatcggcgcgccgttctggtaggcaatgatcagctgacggtactcatcggcggactgcatctggtcgttggcggagagcgtgaccgcgcgggtcgggccgtccagcgaacccttcgctgagttgacgttggcgctgctgatggcggtgcggatggtttcgctggttaaccccagcgcggcaatggcctgggcattcagtttgacgcgaacggcggggcgttgaccgcccgccagcgtcaccagccccacgccggtcacctgagaaatcttctgcgccacgcgggtttcaaccatgtcttccacctgggtcatcggcatggcggaggaggtgacggcaagggtcatgatcggcggatccgccgggttgaccttgctgtaaacaggtggattcggcaggtcagacggcagcaggtttgtggcggcgttaatcgcggcctgcacctcctgctcagcgacgtccagcgacagcgtgagctggaactgaagcgtgacgaccgaagcgccaccggagctctgggaggacatttgcttcaggccagacatctggccaaactgacgctccagcggggcggtgatggcggacgtcaccacatccggactggcgcccggatagagggtgacaacctgaatggtcgggtagtccacttccggcagcgccgacacgggcagaaaacggtagccaatgatcccggccagcaggatcgccaccatcagcagggtcgtcgcaaccggacgtaagataaacaggcgtgatggcccacctgtagagctcggcggcatcacctgcatcaggcttttgctcctgtatcctgcgcttccaccacctcgacctgcgccccttcggtcagacggtcaataccgtcggtcacgacgcggtcgccagcggacagtccggcgctgatcaccaccgtctggctgtcctggatgccggttttcaccagatgtttgctgaccttgttttcgctgttcagcacccagacaaagttgccttcactgcccatttgcagggccgccgtcgggatcactaccgcgttttcttcggtcgcgaccagcattcgcgcgttgacgaactgattcgggaacagggcatcgtcctgattgttgaagcgtgcttttagcttaatggtgccggtggtggtgtcgatctggttatccaggctcaacagcgaaccttcgctcagcttctgcttgttggtgcgatcccaggcttcaaccaccagcgcttttccggccttctgcgcctgtatcaccgtcgcaatgtcgctttccggcagggtaaagacgagatcgatagggtgcgtctgggtgatcaccacgatgcccgtggtatcgccgctggagatttggttgccgatatcaacctgtttcaggcccacgcggccgtcaatcggcgcggtgatccggctccagtcgagctggagctgggcgctggcgaccgcggcttcgtcggccttgatggtgccctgagattcactgaccagagactgctgggtgtccagctcctggcgtgacacgaggttggtttttaccagctgctgatagcgggctaaatcgcggcgggcattggcgagggtggctttgtctttcgcgagctgcccctgcgcctgcgccagggccaccttaaactggcttggatcgatttccgccagcagatcgccggcttttacctgctgaccttcctggaaatggatggccatcaactgaccgtccacgcggctacgtaccgtcacggtgttggcggcggtgatggttcccagcccggagagataacgaggcaccgctttattcaccgccgttgccgcctgcaccggtgccagcgcaccgccgcgcataccgtggcgcccgccgcccgttgagcgttgtgaggggctattagcgccagcaggtgccgtggagttcgcggactggctgtgccagtaccaggcggcggccaggaccaccacaatcagaccaacggcgattgcccagcgggatttgttactgcctttcatcgttatacgttctcatcctgaaactctttcggggaatgatactagtttagtcagctaacacagcgaaaaaatggaggaaatatggaagactgtcgggaattgtctgagtgtggcgcagcggttttcaccctctccccgtgggagagggccggggtgagggcaccagaccgcaccaacgctagctaaacaccacctgcgcccagcgcgccagccctgccgtaacggagccaaagtcatcgccgccggcaatcgggatccccggcagctgttccgccagcgctttcttgatcagcggcgaacgggcgctaccgccagtcaggtaaattacgtccggcttcacgttgccgttctcaagcgctaactgcacctgctccagaatacgctgaagcggctgagtcagcgccatttccagcccttcctgggtgattgccgtagccagatcgtcactgataaacggcagcgaaaccgcatgctctggacgatcggaaagggcgattttgctctcttcggcggtgcgcacgacccggtagctcagacgttgacgccacaccttatacagcagcgcgaccttctctgcatcctgcgcatcacgcaccagatcgttgaggaaacggccattcgcggtgctgtaaaaatcactctgggcagggacgtcgttgatagcaatcgcgttccaccacggcaggatcggcagggcgatgcctttctcggtttgaccgcccatgccgagcagcggcatcaggctcttgaaggccagggcaatatccagatcgttaccgcccacgcggcagccgctgtgccccagcagactgttttcacgatcgcgacggtgatgccactgcggacccatcagcagtaatgaacagtccgtcgtaccgccgccgatgtccactaccagcacccgttgttcttgcgtcagcgtggcttcaaaatccagccccgccgcaaccggctcatactggaacaccacgtcacggaagcctgcccggtgcgctgcacgctcaaggatcccctgcgcctgctggttggcttcgtcgccgcccagcccctgaaagttaatcggacggccaatcaccgcctgggtgatggcatccggcacctgggactgcgcctgattgcggatgtgcagcatcatcgcgcagaccagatcttcaaacatcgccacctgctgcggcttcaggccgctggcgccgaggaaggatttcggcgatttaacgaagtagacctcttccgggtcttcaatgtactgcccgagggaagagaggccgaactgcacgctggacggggtaacgtcgatatcttcctcgcggttaaagctgaccgcacggcgcagcagcgcctgggtctctaccgccgtggccggaacctgatggtggcggaacagccactcgctcaccgcttcacgcgtgggcgcacaaagcattgacggcaacagcgtactgccgttttccattttcaggagctgcggttgtccgttttgcattatcgcaaccgagcagtttgcggtgccgtagtcgaatccaataaacacaataaatccccatgccggtgagaaggggcgagactttagcgaaatgtctgccaggcgacaacaggaatatgaaagcaaggcgcaaggcgatctttcggtttatgctgaggtaaatacaaaaggagagacgatgtacaccctgaactggcaaccgccctacgactggtcgtggatgtttggctttcttgccgcgcgtgcggtcacgggggttgagaccgttacggaggattactacgagcgcagttttggctatgccgggcaccagggcgttttccgggttacgccagacagcgcaacccctacgctggcggtgtcgctcagccctggcctgatcccggtggcggatatctgcctcgaccgcatctcccgcctgtttgacctcgattgcgacccgctgcacattgcgcagactctcggcgagctcggcgcggcgcggccgggcttacgtttgcccggcgcgatggatgcatacgagcagggcgtgcgcgccattctcgggcaactggtgagcgtggcgatggcggcaaaactggcgtcacgggtggtggcgctgtgcggtgaacccattgaggatgcgccgggctatctctgctttcctccgccagaggtgctggccgcggcagatccgctggcgttgaaagccctcgggatgccgctcaggcgtgcggagtcgttgattcatctggcgcagtcggcggtggacggtgaattcccgctgttcccgcctgcgaacgttgaggccgggatgaaggcgctacaacagcgccccggcatcgggcgctggaccgcgaattatctggccctgcgtggctggcaggcgaaggatgttttcctgccggatgactatctgattaaacagcgctttgccggtatgacgcccgcgcagatccgtcgctatgccgaacgctggcagccgtggcgctcgtatgcgctgttacatatctggtacaccgacggctggtcgccgtcagttgatggcgaaatagctggtattcagcagtagatcaagcggctgcgcttccccgatggtgtcgccgtaaataaaatcaacgccgatgcccgacagcgtatccatcatgatcgactgatggcatggcccggcaatggtttttatgcccagacgctgggcgtggccctgaatgattgtcaccatcatctcatccatcagattgccgtggatgttggtcaccatgtctgtatccagcagcagataatcggcggtgttggcgctgagctggctgaagacgttcatatcgcgtccgacccgggtcagcaccacgcgacagccggcctgacgaagcttttgcagaccctgctgcacgttttcatccgtattgctcagcacatcaacggcgatcgccagatgcagcagccgcgccggcagcggacctctggtgatcaggtcgagcagctcatccaccagcgtgacgctggctaaacccgcttctgagagcggcagcgcgacgcccattcctttggccgccacctgtgcggcataggtacggaaaaattcgctgaatatccgtcggtccagggcgtgcagcagctccggctccgccagcccggcgcggaaggcatgctcttccagcacttctccctggctggtccacagccgcaaggaaatgagccagaagctactgctctcgggaatgcgcggcgaggcgacgctgcgggcgatcatcagcagatggttatctttaatcatgtgccactgctcatccagcgacatcatgctgcgcgtgctgtggatccgctcctgctggggttcgtagacggtgaccacgccgcgcccgctgtttttcgaggcgtagcaggcgatatcggcctgagacatcacttccgcagcctggtaattggtgtcgtcaatcagcgtaatccccgcgctggcgccaatgcggtgcaggcgtccttcccaggaaaaatgatagttgttgatggcgtcgatcaaccggcccgcaatatagcgtgcgctttcgacgttgcagtccggcagcagcaggccaaactcgtcgccgcccagacgcgccagcacgtcgctggagcgcagcatggtcagcatcagcgaagagagttcgcgcaggagagcgtcgcccgccgcgtggcctgccgtatcgttcaccgccttaaaacggtcaagatcgataaagaccagcgcgtgacgctgatgggtctcctgtaccgtctgcaacaggcgcttaagatggttttcaaagctgacgcggttcgccaggtgggtaagggcgtcatgggaagcgctgtagctcagctggcgcagcattttgcgcgactcggtgacgtcctgaatcaccagcaccgagccgatggtgtgtccttccagagtgctgaggggggttatgctgtaatgaatgtcgaaactgccgccattgcggcagttaagcaccacatcctgttcgatatcggtacgggacatatcgccgctgtggatgttttccattaacggaccgttctcgccgaaggtaatgtgtagcaccttcagaatgggctgacccatcgcttcgctttgcgaccagccgctcatcttctcggcgaccgggttcataaaggtgatgttcatgtcgatgtcggtacacagcaccgcttcgccgatggagtcgagggtgatatgcaggcgctctttttcctggaacagcgcctcgttcagctgcttcacctcggtcatatccatgttgatccctaacagccgctccacttcgccctgtttgttcagcacccggttcgccagcgaacgaatgtggcgaatgccatccttgacgcgaatgcgaaattccagcttgaaaggtaccctggcctggagtgactcacgcaggacctgttcggcgtgcgtacgatcttcaggcaccatggccgcatgccagagctgccaggtgggtttaatgtgcgaggggatctcgtacagctcaaacatccgtttatcccagctgattacgtccggctcgagatcccactcccaaatcccgattccgccggcttcgttagcgagagtgatacgctccatcagacgcttattcacccactcggtctgtttcagatcgttgatgtcttcaatctgggcaataaagtagagcggggtgccgtcggcatggcgcacaacggagacggccagcagcgcccacaccacctcgccgctgcgggtgtagtagcgtttttcgagggtgtaggtgttgatctcgccgtgaatcagctgttgcagctgctccaggtcggtatttaaatcttccggccaggttaactgctggaacgtgagcgactgaagctcggactggctgtaaccgaggaaattgcacagagccttgttggcctggagccactggccctcnnnnnnnnnnnnnnnnnnnnnnnnnnnnnnnnnnnnnnnnnnnnnnnnnnnnnnnnnnnnnnnnnnnnnnnnnnnnnnnnnnnnnnnnnnnnnnnnnnnnnnnnnnnnnnnnnnnnnnnnnnnnnnnnnnnnnnnnnnnnnnnnnnnnnnnnnnnnnnnnnnnnnnnnnnnnnnnnnnnnnnnnnnnnnnnnnnnnnnnnnnnnnnnnnnnnnnnnnnnnnnnnnnnnnnnnnnnnnnnnnnnnnnnnnnnnnnnnnnnnnnnnnnnnnnnnnnnnnnnnnnnnnnnnnnnnnnnnnnnnnnnnnnnnnnnnnnnnnnnnnnnnnnnnnnnnnnnnnnnnnnnnnnnnnnnnnnnnnnnnnnnnnnnnnnnnnnnnnnnnnnnnnnnnnnnnnnnnnnnnnnnnnnnnnnnnnnnnnnnnnnnnnnnnnnnnnnnnnnnnncatcgcattgcgaaaacgttcttcgctttccgtaatatgtttacgctcggcccggaaggcatacatcaccatcgtcataatgttggcggggagcagcatcatcaggaaggggagccacggcgcgttgaaggtgacgatcatggtggagggcgtcatggagagcggatttcgcgccatcatcagggacaccatcatgatggtgaataaaaatatcaggaacgcttccatacgcggcagacggaccgcgctccacatcagtaaaacgataatgcaggtgaatggccacggcagccaggtgattgccgtccagctaagaaccagcgtgacgaccagggtcaccaacgtttccagcagcagtttcgggttgcggtggcgcagcaggtaatgcggcttaaacagcagacctaacggcaccagcgccagtgcgccaatggcttctgaaagtacccagacaaggaaattacgcagcggctccgcgctcggcaccagaaaatgaaccagaacgccccccaccagcggcggcaccagggcactgccgagggcaagccggacccagtcgttgaggttttgcagcggattataccaggggagcagcttacgcagtaacagcgcgccaaccgtggcctcaatgatattgatcgccgtgtaggtgatattgatcgatgcccatgagaagagcatccacgaggcaaaaatattgccaaaggagcaggcgagcgcaatgccgggccacatttttcccgcatggcggtaaaacgccaccatcataattgaagtcgggaaccatagtggcgccagcagcgtaccgaagcgagtcagctcgagggaaaataaggtgaagatgaacgtgaccagacccagacagacaagccgcagtaaaggatgtggggtagtaaccaaaacccgctggtattgtttattcattaccgctctatccagggacgccatgttgtcaggagccaggtccggacgcgtgaaattaataatttggtttatgctagtacaaacattttacaattcatatgctgagtggtcagattttgacttcatagacttataaaatagttactctgcgaagaagggtgatgaaatggcgaaaaaccgcgcgtaaaaattttgctaaaggcgtgaaacagcgcttttcagcccgcctcgcataacctgcgcattcgactggtatcacgcccccgaaatccctataattgccgcgtttgacgctccggcgtcgtccttccttacatccaggttaatcaggtcgctaaatttatgactgataagtctcatcagtgcgtcatcataggcatcgccggcgcatcggcttcaggtaaaagtctcattgccagtacgctttatcgcgaactgcgtgaacaagtgggtgatgagcatatcggtgttattcccgaagatagctattacaaagatcaatcccatctttcgatggaagagcgcgtaaaaaccaactacgaccaccccagtgcgatggatcacagcctgctgttccagcatctggaagcgctgaagcgcggcgaggcgattgagctgcccgtctacagctacgtggaacatacccgcacccaggaaacgatccgtatcgagcccaagaaggtgattatccttgaagggattttgctgctcaccgacgcccgtctgcgcgaatctatgaacttctcgattttcgtcgacactccgctggatatctgtctgatgcggcgtattaaacgcgacgttaacgaacgcggccgctccatggactccgtgatggcgcaatatcagaaaaccgttcgcccgatgttcctgcaatttattgagccttcgaaacaatacgccgatattatcgtgcctcgcggcggtaaaaaccgtattgccattgatatcttaaaagcgaaaatcagtcagttttttgaataagccgtgtgaattgtgtaccgttcagagataacctggttttgccctgacgccgtaaggcttcagggcgcgatgcacgaaaggagaaagtgccatgcgtctttgtgaccgcgatatagaagcctggctggatgaaggccgcctgtctatcaccccgcgtccgccggttgagcgtattaacggcgtgaccgtcgatgtgcgtctggggaataaattccgcaccttcagcggccacacggcaccgtttatcgacctcagcgggccaaaagacgaagtcagtgcggcgctggatcgcgtcatgagcgacgaaatcgtcatcgaagaaggagaggcgttttatctccatcctggcgaactggcgctggcggtgacctttgaatcggtcacgctgcctgcggacctggtcggctggcttgacggacgctcttccctggcgcgtctgggcctgatggtgcacgtcaccgcgcaccgtatcgatccgggctggtctggccgtatcgtgctggagttctttaacgccggtaaattgccgctggcgcttcgtccgggaatgatgattggtgcgttgagctttgaaccgctgaccggcccggcagaccgtccttataaccgccgtcaggacgcaaaatatcgcgaccagcagggtgcggttgccagtcgtatcgataaagactgatctgtgagttcactgaggaagccatgagaagagttctgacaacgctgatgattttgctggtggtgctggtggctggcctttcagcgttggtgctgctggttaacccgaatgacttccgggcctacatggtgcggcaggtggaagcgcgcagcgggtatgaactcaagctggacgggccgctgcgctggcacgtctggcctcagctcagcattctctccggacgtatgtccctcatcgcgccgggtgccgcgcagccgctggtcacggcggataacatgcgtcttgatgtcgcgctcatcccgctcttatcccatcagctccaggttgaacaggtgatgctgaaaggggcggtgattcagcttacgccgcaaaccgaagccgttcgtcaggcggatgctccggtcgcaccgcgtgaaaacaccttgcctgacgtcccgtctgacaccggctggtcgttcgatattggtaatctgaaagttgctgacagcgtgctggttttccagcatgaagatgacgaacagatcaccgtacgcaatatcaacctcaggatggagcaggatgccaaccatcaagccaccatggagttctccgggcggatcaaccgcaatcagcgcgatctcaacctgtcgatgaacgcgaacgtgaacgcctctgattatccgcaccagctgacggcggacgttcagcagcttaactggcagctgaccggcgcggatttacccgcgaaggggattgccggccagggcacgatgcaggcggtgtggcatgaagagcgcaaacagctcgaactgaacgcgctcaacctccaggccaacgacagtgccctgaaggggcaggcgagcgtcacgcttgatgagaaacctaagtgggtgctggatctgcaattcgacaagctgaacctcgagaacctgcttccgccccaaccggtgaacgcgaccgatgagggagccacgcaggtggggcaaagccaggtcacgcagtcgcgtccggtgatctcctcaaatctcgatcagcctgactacaacggcctgcgcggattcaccgccgacattctgctgaaagcgaacagcgtgcgctggcgtgggattgattttactgacgtcagcagccagatgttcaaccacaacggcctgctggtcatctccgagctcagcggaaaaatgggagcggggaacctctccctgccgggctcgctggatgtacgcaaagacgttgccagcgccgcgttccagccgcgtctggaaaacgttgagattggcaccatcctgaaagcctttaattacccgattgccctcacggggcagctgtcgctggcaggggatttctctggtacgaagattgatgcggacgctttccgtcgtagctggcaggggcaggcgcacgttgagctgaaagattcgcgcatggaagggctgaacttccagcagctggtgcagcaggcggtagagcgcagcagcagcgtgaaagcgaatgaaaactacgacagcgcaacccgtctggacagctttaccagccagcttgccctcgacaacggtcagctctcgctggacgacatgcaggggacttcgtcactgctggcgctgaccggaaccggcgcgctggatctggtgaaagagacggcagacacccgcttcaacgtccgcgtgaaggctggctgggaaggcgaaggccagcttgtggagttcctgaaagagacgccgataccgctgcgcgtgtacggaaaatggcaggagttgaattacagtttgcaggtcgatcagatcctgcggaagcaccttcaggatgaagcgaaacgtcggctgaatgactgggcggaccgcaataaagagtctcagtcaggtaaggacgtgaaaaagctgctcgataagctgtgatgcctgttgtgccgggtggcggctttgtcttacccggcctataaaagccagacaccgtaggccgggtaagcgaagcgccacccggcttttttacacctcaaaatccatctcatcttcaccgcgcagcggtatcagctgcaccttctgcacgcgatggctctctacctgcaaggttttgatcatgtaatcccccacctggacctcttcgcccggctgcggaatacgttgcagatattccatcagcaaaccggcgatggtgtggtattcgcgcttctcatccagcggaagcggaacgaactgcaccagatcttcgagcggcatatggccgttggcggtccagctgccgtcggcgtttttctgaatatcgtgacgcgcatcgatctcatccacctcattaggcagattaccggcgatggtttccatcacgtcgctgagcgttaccagcccttccacagaaccaaactcatcaacgacaaacgcgaagtgggtacgagcgttgcggaactgctccagcgcggagagcagcggcagcgcttccgggaagaccagcggctggcgcaccagcgcccgcaggttgagcggctcgccgtggagctgctgttgcaggaggtcaatcacgtgtaccacgcccagcagctcttcttcctcttcaccgccggtcacgaccacgcgggtgtgctggtttttatccagcagggcgcggatctgctcttccggcgccgtcaggtcaatatgctcaatgtcatggcgggaggtcatgatactgctcaccgagcgctggttgaggttaagcacgcgctctatcatccggcgttcctgcgggttgaagatctgcccgtcgctgtggtcggcaagcatcgccgcggattcagcatccagctcggcatcctcttttttgccgctcagcaggcgcatcaccgtatctgcggtgcgctgtcgtaatgtctggttcgcggagagaaaacggcgacggttgaaaatggccagctggttgagaaactcaatcagcaccgagaaaccaatggcggcgtacagataccctttcgggatatggaagccaaaaccatccgcgaccaggctaaatccaatcatcagcaggaagctcagacagaggatgacgatagtcgggtgactgttcacgaagcgcgtcagggctttactggcgagcaccatcagggtgatggcgatgatcaccgcggccatcatcaccgccagatggtcaaccatcccgacggccgtgatcacggagtcgagagaaaagacggcatccagcaccactatctgcgcgaccactggccagaattttgcaccgcgtcgctgggtggggttttcactgtcttttccttccagccgctcattaagctcaaccgtggctttgaacagcaggaacaatccgccgaaaagcatgatcaggtcgcgggcgctaaagctcagaccctgcacgctgaataagggtttggtcagcgtcaccagccaggagattgaggccagtaacagcagacgcatcaccatggcgagcagaagacccgtcacgcgggcgcggtcgcgttgtgaagggggtaatttatcggcaaggatggcgataaacaccaggttatcaatgccgagcactaattcgatgacgaccagcgtcaccagcccggcccagattgatggatcggcaatccattccatagtaaatgcaataccttctgttatatgactaatgtcacacttcgatcatggataaagccgacggaaattgcaatgccggggtgagatttctcttaatgctacactcaggtaaaccccatttgccgggcggtgtaaataagttaattgcgaagatttaattacataagacgatatttaggatatatcgcaataaatggtccggcgatctattttgtcaatataaagaaaatccgaaaaccttaaaactttgctcttaatattaatcttaaaaacgaatattaggacggttgtctccttgcctgctattaggttagctgcaacaattcttccagcatcaaatgttaaatctccttgttgctatttttgtttcggtctttggtgaaggttatacattatcaatcgcccctgtgaggcgtttgatatatttcgcaaaaggccttatccaagagggtgtctaaccataacgcattgtttagtcagtggattggtaactgaaagccaagggcggtagcgtgcctgaaagcgtgtgaatcagcctcaattattctgtcaatagccaatggatgaataagctttttttaggactgatgccagttatattgctaaatgattaactgcattctgattgtcaccacgacccgcgcttattttaattgcacaggataattactctgccaaagtgataaataatcaatgatgaaatccaaaatgaaattgatgccattattggtgtctgtgaccttgatgagtggttgcacggtctttcccggcagcaatatgtcgacaatgggcaaggatgtgattaaacagcaggatgctgattttgatctcgacaaaatggtgaatgtgtatccattaaccccacgtctggtggaacaattacgcccacgtccaaatgttgctcagccaaatatgtctctggaccaggaaattgcctcttaccagtatcgcgtgggtccgggtgacgtcattaatgtgaccgtctgggatcaccctgaactgaccacgcctgcgggccagtaccgcagctcaagtgacaccggtaactgggttcagtccgatggcaccatgttctatccctacattggcaaagtgcacgtcgcgggcaaaacgcttgctgagatccgtagtgatattaccggccgcctggcgcagtacattgctgacccgcaggtggacgttaatatcgccgcgttcagatcccagaaagcctatatctctggccaggtcaataaatccggccagcaggcgatcaccaacgtcccgctcaccgttctcgatgcgatcaatgccgcaggcggcttaaccgacggcgctgactggcgcaacgtggtgctgacccacaacggcaaagagcagcgcatttcgcttcaggcgctgatgcaaaacggtgacctgacccagaaccgcctcctttatccgggcgatattctgtacgtgccgcgcaacgacgatctgaaagtgttcgtgatgggtgaagtgaagaaacagagcaccctcaagatggacttcagcggtatgaccctgaccgaagcgctgggcaatgcggaaggcatcgatctgaccgcctccaacgccagcggtatcttcgtgatccgtcctatcaaaggcgagaacgcgaagggcaagattgccaacatctaccagctggatatgtccgacgcgacgtccctggtcatggcaacgtcgttccgtctccagccgtacgatgtggtctatgtcaccaccgcgccggttgcccgctggaaccgtctgatcaaccagttgctgcctaccatcagtggcgttcgctacatgacggatacggcgagcgacgttcataactggtaagccgcgatgtttaacaaaattctggtggtgtgcgtggggaacatttgccgttcccccacggctgaaaggctgttgaaaaattaccagcctgcgttaacggtcgactccgcagggctgggcgcgctggtcggaaaaggtgccgacgaacgtgccgcaagcgttgcccttgagcataacctctcactcgacgggcacgttgcccgtcaggtctctggccggatgtgccgggaatatgacctgatcctcgcgatggaaaaacgccacattcacgcgctgtgcgatatcgcaccggagatgcgcggcaaggtgatgctgtttggtcactgggatggtgagcgcgaaattcccgatccgtatcgcaagagccgcgaggcctttgaggcggtatacaccttactagaccagtctgcccgtcagtgggcgcaggcactgaaagctcagcagggataacaatgacagaaaaaacaagaccttctgccgccccgacgtcgggcagtgatgaaatcgatatcggtcgcctggtcgggaccgttattgaagcgaaatggtgggtgctgggtattaccgccatctttgccgtggcggcgatcgtttatacgctgttcgcgacgcctatttacagcgccgacgcgctggtgcagatcgaacaaaataccggaaactcgctggttcaggatatcggctcggcgctggccaacaagccgccggcatcggaagccgaaattcagctgatccagtcgcgcctggtactgggcaaaacggttcacgatctggggctggatatcgcggtcaccaaaaacaccttcccggtatttggcgcaggctgggatcgcctgatggggcgcagtaacgatacggtaaaagtgaccgacttcgtgatcccaaaaggggcaggggaccaaacctttaccctgaccgtgctgggaccaaaacagtatcaactgaccagcgacgcgggcttcagcgcacgcggtgaggtggggcagatgctgaccaaagagggcgtcagcatcaaggtcagcgcaattcaggcgcatgagggcggggagtttacggtcaccaaattctcgacgctcgggatgatcaacaacctgcaaaacaacctgaccgtcaccgaaaacggcaaggacaccggcgtcctgagcatgaccttcaccggtgaagacaaggatcaaattcgcgacatcctcaatagcatcacccgcaactatctggagcagaacgttgagcgcaagtcagcggaagccgcaaaaagcctggcgtttctcagtaaacagctgccggaggtgcgcgcccgtctggatgacgctgagaacaagctgaacgcgtaccgtcaggacaaggattccgtcgatctgccgctggaggcgaaatcggttctcgactccatggtgaatattgatgcgcagctgaacgagctgaccttcaaagaggcggagatttccaagctctataccaaacgtcacccggcgtaccgcacgctgctggagaaacgtcgtaccctggaagaagagaaggcgaagctgaatgaccgcgtgaccgcgatgccgaagacgcagcaggaaattgtacgcctgacgcgtgatgtggaatccggccagcaggtttacatgcagctgctgaacaaacagcaggagctgaaaataaccgaagccagcaccgtcggcgacgtgcgtatcgttgacccggcgattacccagccgggcgtgctgaagccgaagaaagcgctgattatcctcggcagtattattctcggcctgatgctttccattgtcggcgtgctgctgcgctcgctgttcaaccgcggtatcgaaagcccgcaggtgctggaagagaacgggatcagcgtgtacgccagcatcccgctttcagagtggcagaagtcccgtgacagcgtcaaaaccgttaagggcgtcaagcgttacaaacagagccagctgctggccgtgggtaacccgactgacctggcgattgaagcggtgcgcagcctgcgtaccagcctccacttcgccatgatgcaggccaaaaacaacgtcctgatgatgaccggtgtcagcccgtcaatcggtaaaaccttcgtctgcgccaacctggcggcggtggtgagccagaccaacaagcgcgtgctgttgatcgactgcgatatgcgtaagggctacacccatgagctgctggggaccaacaacgttaacggtctgtcggaaatcctgctcggtaaaggggaaatcagcgagagcgccaagccgacgtcgattccgaaatttgacctgatcccgcgtggccaggtgccgccgaacccgtctgaactgctgatgagcgagcgcttcacgcagctgattgagtgggcgagcaaaaactatgacctggtgctgatcgataccccaccaattctggcggtcaccgacgccgccgtggtagggcgtcatgcgggcaccacgctgatggtcgcacgctatgcggtgaacaccctgaaggaagtggaaaccagcctgagccgctttgagcagaacggtattgaggtgaagggggtcattctgaactccatcttccgccgcgcgaccgggtatcaggattacggctactacgagtacgaatacaagtctgacagtaaataataatccccctcatnnnnnnnnnnnnnnnnnnnnnnnnnnnnnnnnnnnnnnnnnnnnnnnnnnnnnnnnnnnnnnnnnnnnnnnnnnnnnnnnnnnnnnnnnnnnnnnnnnnnnnnnnnnnnnnnnnnnnnnnnnnnnnnnnnnnnnnnnnnnnnnnnnnnnnnnnnnnnnnnnnnnnnnnnnnnnnnnnnnnnnnnnnnnnnnnnnnnnnnnnnnnnnnnnnnnnnnnnnnnnnnnnnnnnnnnnnnnnnnnnnnnnnnnnnnnnnnnnnnnnnnnnnnnnnnnnnnnnnnnnnnnnnnnnnnnnnnnnnnnnnnnnnnnnnnnnnnnnnnnnnnnnnnnnnnnnnnnnnnnnnnnnnnnnnnnnnnnnnnnnnnnnnnnnnnnnnnnnnnnnnnnnnnnnnnnnnnnnnnnnnnnnnnnnnnnnnnnnnnnnnnnnnnnnnnnnnnnnnnnnnnnnnnnnnnnnnnnnnnnnnnnnnnnnnnnnnnnnnnnnnnnnnnnnnnnnnnnnnnnnnnnnnnnnnnnnnnnnnnnnnnnnnnnnnnnnnnnnnnnnnnnnnnnnnnnnnnnnnnnnnnnnnnnnnnnnnnnnnnnnnnnnnnnnnnnnnnnnnnnnnnnnnnnnnnnnnnnnnnnnnnnnnnnnnnnnnnnnnnnnnnnnnnnnnnnnnnnnnnnnnnnnnnnnnnnnnnnnnnnnnnnnnnnnnnnnnnnnnnnnnnnnnnnnnnnnnnnnnnnnnnnnnnnnnnnnnnnnnnnnnnnnnnnnnnnnnnnnnnnnnnnnnnnnnnnnnnnnnnnnnnnnnnnnnnnnnnnnnnnnnnnnnnnnnnnnnnnnnnnnnnnnnnnnnnnnnnnnnnnnnnnnnnnnnnnnnnnnnnnnnnnnnnnnnnnnnnnnnnnnnnnnnnnnnnnnnnnnnnnnnnnnnnnnnnnnnnnnnnnnnnnnnnnnnnnnnnnnnnnnnnnnnnnnnnnnnnnnnnnnnnnnnnnnnnnnnnnnnnnnnnnnnnnnnnnnnnnnnnnnnnnnnnnnnnnnnnnnnnnnnnnnnnnnnnnnnnnnnnnnnnnnnnnnnnnnnnnnnnnnnnnnnnnnnnnnnnnnnnnnnnnnnnnnnnnnnnnnnnnnnnnnnnnnnnnnnnnnnnnnnnnnnnnnnnnnnnnnnnnnnnnnnnnnnnnnnnnnnnnnnnnnnnnnnnnnnnnnnnnnnnnnnnnnnnnnnnnnnnnnnnnnnnnnnnnnnnnnnnnnnnnnnnnnnnnnnnnnnnnnnnnnnnnnnnnnnnnnnnnnnnnnnnnnnnnnnnnnnnnnnnnnnnnnnnnnnnnnnnnnnnnnnnnnnnnnnnnnnnnnnnnnnnnnnnnnnnnnnnnnnnnnnnnnnnnnnnnnnnnnnnnnnnnnnnnnnnnnnnnnnnnnnnnnnnnnnnnnnnnnnnnnnnnnnnnnnnnnnnnnnnnnnnnnnnnnnnnnnnnnnnnnnnnnnnnnnnnnnnnnnnnnnnnnnnnnnnnnnnnnnnnnnnnnnnnnnnnnnnnnnnnnnnnnnnnnnnnnnnnnnnnnnnnnnnnnnnnnnnnnnnnnnnnnnnnnnnnnnnnnnnnnnnnnnnnnnnnnnnnnnnnnnnnnnnnnnnnnnnnnnnnnnnnnnnnnnnnnnnnnnnnnnnnnnnnnnnnnnnnnnntggtgcagttgtcgaaggccgatatcgcgcaggctgtttttggcacggacctggaatcgttccgcaaccgtagccgcaaagcgtacagtggacaacagatgctggaggagtatgtctcgttctatcagaatctgtagttatctgctgctgccgctgatctacctgctggtcaacgttaagattgcccagctcggtgaaagcttcccgatcactatcgtcaccttcctgccggttctgctgttgctttacgttgacaagcttaacctcaaaaagctgatgatttcactgggcatcgggtttggtctgacggcgtttaactacatctttggtcagtcgctggacgccagcaaatatgtcacctccaccatgctgtttgtttatatcgttatcattattggcatggtgtggagtattcgctttaaaactatttctccgcacaattataggaaaatcctcaggttcttttatattgtcgtcgggctgattgttgtgcttgcggcaatggagatggcgcaaattattctcacaggcggcagtagcctgatggaaataatttcgaaatatcttatatacagtaacagctatgtactgaacttcattaagtttggtggcaagcgtacaaccgcgctctattttgaaccggcgttttttgctctggcattaatctcaatttggctcagcatcaaacagttcggtatcaaaacccccaagaccgatgctatgattcttgcaggaatcgttctgtcagggtcgttctccggggtaatgacgtttattctgttttacctgctggagtgggcgttccagtacctgaacaaagaggcgattaagaaaaaactgccgctggcgataatctctctgacggtatttttagtgggcgtaatatttgcgtttccgtacatttctgaacgtctgggtgatttgggaacggaaggttcgtcgtcctattatcgcatcattggtccactggtgatggtgggttattccttaacccatattgatggcgtagtaagattcggctcactttacgaatatgttgcatcattcggaatctttaacggtgcggatgtcggtaaaaccatagacaatggtctgtatctgttaattatctatttttcctggttcgccgtactgttgacactgtggtatctgtttaaagttttcaaaatgatgattaacgcgtttggtgataaccagaactttcgcgtgcaactttatctgttcacaccggtgtcgttgttttttaccgggtcaatatttagcccggaatatgcattcttaattgtatgtccgtttattttgcgcaaagcgctgaatattacgagcgtatgacgaaatgaggtgatttatgtttcttagcgtcattactgtcgcctttcgtaactacgaaggggtggtaaaaacctggcgctcgctgcgcaacctggcgcgcgatccgagcctcacctttgagtggatcgtggtcgatggcggctcgaacgacggcacggcggagttcctggaaaaactcaacggtgagttcaacttacgttacatcagcgagaaagataaaggcatttacgatgccatgaataaaggcatcaacatggcgcaggggcgttacgccatcttcctcaattccggcgatgtgttccatgaagatgtggcgctgtttgcccgtcagctggcgcgccagaaagaagatgccatgtttattggtgatgcgctgcttgatttcggcgaggggaaaaaagtgctgcgcggcgcgaaaccaggctggtatatctaccacagcctgccggccagccatcaggctattttcttcccaatgagcggcctgaaaaaacagccttacgatttgcgctataaagtgtcatcagattatgccctggcggccagcctgtacaaatctggctacccgttccgtcgaattaaaggactggtatctgaattttcaatgggtggcgtgtcaacctcgaataatctggaactgtgccaggatgccaaaaacgtgcagcgtaaaatattacgcgtgccggggttctgggcggaattatcttatttcttacgtctgaaaacgacgggtaaagcgaaagccttatataacaaagcctgagatataaggaaacgtaatgcaggaattaaatggattctccgtgccgaaaggttttcggggcgggagcggtattaaagttcaactgtggtgggctgtacaggcaacgttatttgcctggtcgccgcaaatactgtaccgctggcgcgcatttttactgcgtctgtttggcgcaaaaataggaaaaaacgtagtcattcgaccttcggtgaaaattacttatccctggaaattaacgcttggggattacgcctgggttggggatgacgcggtgttatatacccttggcgagattacgatcggcgcaaattcggtggtttcacagaagtgttatttgtgcaccggcagccacgattttatgagcccgcattttgatattaccgcttcgcctgttgtgattggtgaaaaatgctggctggcaacagatgtctttgttgcacccggtgtttctgttggcgatggcacggtagtcggtgcccgcagcagcgtttttaaatcgcttccggcaaataaaatttgccgtggcaaccccgcagtggtgatacgcgaacgcgttgaaactgaaaaactttgataagtacagaggaatataaacatgtctaaagtcgctctcatcaccggcgttaccggacaagatggttcttacctggcagaattgctgctggaaaaagggtatgaagttcacggtattaagcgtcgtgcctcttcattcaacaccgagcgtgtcgatcacatttaccaggatccgcatgcggcaaacccgaaattccatctgcactacggcgacctgaccgatacctccaacctgacccgcatcctgcaagaagtacagccggatgaagtgtacaacctgggggcaatgagccacgttgcggtatccttcgagtccccggagtacaccgctgacgtggatgcgatgggtacgctgcgtctgctggaagcgattcgcttccttggtcttgagaagaaaacccgcttnnnnnnnnnnnnnnnnnnnnnnnnnnnnnnnnnnnnnnnnnnnnnnnnnnnnnnnnnnnnnnnnnnnnnnnnnnnnnnnnnnnnnnnnnnnnnnnnnnnnnnnnnnnnnnnnnnnnnnnnnnnnnnnnnnnnnnnnnnnnnnnnnnnnnnnnnnnnnnnnnnnnnnnnnnnnnnnnnnnnnnnnnnnnnnnnnnnnnnnnnnnnnnnnnnnnnnnnnnnnnnnnnnnnnnnnnnnnnnnnnnnnnnnnnnnnnnnnnnnnnnnnnnnnnnnnnnnnnnnnnnnnnnnnnnnnnnnnnnnnnnnnnnnnnnnnnnnnnnnnnnnnnnnnnnnnnnnnnnnnnnnnnnnnnnnnnnnnnnnnnnnnnnnnnnnnnnnnnnnnnnnnnnnnnnnnnnnnnnnnnnnnnnnnnnnnnnnnnnnnnnnnnnnnnnnnnnnnnnnnnnnnnnnnnnnnnnnnnnnnnnnnnnnnnnnnnnnnnnnnnnnnnnnnnnnnnnnnnnnnnnnnnnnnnacccacgttctccgtacgctgtggcgaaactgtacgcttactggatcaccgtgaactaccgtgaatcctacggcatgtacgcctgtaacggcattctgttcaaccacgaatctccgcgtcgcggcgaaaccttcgtgacccgcaaaatcacccgcgcgatcgccaacatcgctcagggcctggagtcttgcctgcacctcggcaacatggattccctgcgtgactggggccatgcgaaagactacgtgaaaatgcagtggatgatgttgcagcaggaacagccagaagacttcgtgatcgcgaccggcgtgcagtactccgtgcgtcagttcgttgagatggctgcggcacagctgggcatcaagctgcgcttcgaaggcaccggcgtggaagagaagggtatcgttgtttccgtaaccggccacgacgcaccgggcgtgaagccaggcgacgtgattgtccaggttgatccgcgttacttccgtcctgctgaagtggaaaccctgctgggcgacccaaccaaagcgcacgagaaactgggctggaaaccagaaaccaccctgcaagaaatggtatccgagatggtggccaaagatcttgaagcagcgaaaaaacactccctgctcaagtctcatggctacgaggttgccatcgcgctggagtcctgagaatgacaaaacaacgtatttttgtcgccggtcatcgcggaatggtgggttccgcgattgttcgccagctggaacagcgcggcgacgttgaggtgattgttcgcacccgcgacgagctgaacctgcttgacagcaaagcggtgcaggacttcttcgccagcgaacgtatcgaccaggtgtatctggcggcggcgaaggtgggcggcattgtcgctaacaacacctacccggcggatttcatctacgagaacatgatgattgagagcaacatcattcacgcggcgcatctgcacaacgtgaataaactgctgttcctcggctcatcctgtatctacccgaaaatggcgaagcagccgatcgccgagagcgaactgttgcagggcacgcttgaagccaccaacgagccgtatgcgattgccaaaattgccgggatcaagctgtgtgaatcctacaaccgtcagtataaccgcgactatcgctcggtgatgccgaccaacctgtacggaccgcacgacaacttccacccgagcaattcgcacgtgatcccggcgctgctgcgtcgtttccacgaggcgactgccgaaaacgccccggacgtggtggtgtggggcagcggtacgccaatgcgtgagttcctgcacgtggacgacatggcggcggccagcattcacgtcatggagctggatcgcgaggtgtggcaggaaaacaccgagccgatgctgtcgcacattaacgtcgggaccggcgtggactgcaccattcgcgagctggcgcagaccatcgcgcaggtggtgggctacaaaggacgcgtggtgtttgacgccaccaaaccggacggcacgccgcgcaagctgctggacgtgacccgtctgcatcagctgggctggtatcacgaggtctcactggagcaggggctggccagcacctaccagtggttcctggaaaaccagcaccgcttccgggggtaatgatgtttttaagtcaggaagattttgccacggtagtgcgttccactccgctgatctcaatcgatttgatcgtggagaatgaacgcggcgagttcttgctggggaaacgaaccaatcgtcctgcacagggcttctggttcgtgcccggcgggcgcgtgcagaaggatgagacgcttaccgatgcgtttgagcgtctcactctggcggaactgggcctgcaactgccgatggcagcgggccagttttacggggtctggcagcacttctatgacgataacttttcaggcaccgggttcaccacgcactacatcgtgctggggttccgcctgaaggtgagtgaggcagacctgcgtctgcctgattctcagcatgacgattaccgctggttaacgccagaggcgctgctggcaagcgacaacgtccatgacaacagtcgggcgtacttccttgcggaacgtcaggccgaggtgccaggtctatgaaaatcctcgtctacggaattaactactcgccggagcttaccggtatcgggaaatacaccggcgagatggtcgagtggatggcgagccagggacatgacgtgcgggtgattactgccccgccgtattacccggagtggaaggtaggcgaacgctattccagctggcgctaccgccgcgaagagggcgccgcgatcgtctggcgctgcccgctctacgtgccgaaacagccctcgacgctgaaacgtttaattcatctgggcagctttgccctgagcagtttcttcccgctgatggcgcagcgtcgctggaagccggatcgcatcatcggcgtggtgccgacgctgttctgcacgccaggcatgcgcctgctgggcaaactctccggcgcgcgcaccctgctgcacattcaggattatgaagtggacgccatgctcgggctggggatggccgggaaaggcaagggcggcaaggtggcgaagctcgccagcgcctttgagcgcagcggcctgcacaacgtggattacgtctcgaccatttcgcgctcgatgatgaacaaggcgcaggagaagggcgtcccggcggaaaaagtgatcttctttccgaactggtccgaagtggcgcgcttccgcgatgtgacagaccaggatgcgcaggcgttacgcgcgcagctcgggttgcctgctgagcaaaaaatcnnnnnnnnnnnnnnnnnnnnnnnnnnnnnnnnnnnnnnnnnnnnnnnnnnnnnnnnnnnnnnnnnnnnnnnnnnnnnnnnnnnnnnnnnnnnnnnnnnnnnnnnnnnnnnnnnnnnnnnnnnnnnnnnnnnnnnnnnnnnnnnnnnnnnnnnnnnnnnnnnnnnnnnnnnnnnnnnnnnnnnnnnnnnnnnnnnnnnnnnnnnnnnnnnnnnnnnnnnnnnnnnnnnnnnnnnnnnnnnnnnnnnnnnnnnnnnnnnnnnnnnnnnnnnnnnnnnnnnnnnnnnnnnnnnnnnnnnnnnnnnnnnnnnnnnnnnnnnnnnnnnnnnnnnnnnnnnnnnnnnnnnnnnnnnnnnnnnnnnnnnnnnnnnnnnnnnnnnnnnnnnnnnnnnnnnnnnnnnnnnnnnnnnnnnnnnnnnnnnnnnnnnnnnnnnnnnnnnnnnnnnnnnnnnnnnnnnnnnnnnnnnnnnnnnnnnnnnnnnnnnnnnnnnnnnnnnnnnnnnnnnnnnnnnnnnnnnnnnnnnnnnnnnnnnnnnnnnnnnnnnnnnnnnnnnnnnnnnnnnnnnnnnnnnnnnnnnnnnnnnnnnnnnnnnnnnnnnnnnnnnnnnnnnncctgctgagcaaaaaatcattctttactcaggcaacatcggcgaaaaacaggggctggagagcgtgattgacgccgcgcttcagctgagcgaacacccgtggatgttcgtgatagtcgggcagggcggcggtaaagcgcggctggaaaaaatggccagcgagcgcggactgaccaacatccgcttcttcccgcttcagtcttatgacgcgctgcccgcgctgctgaaaatggcggattgccatctggtggtgcaaaaacgcggcgcggcggatgcggtgctgccgtccaagctgaccaacattctggcagtgggcggaaacgcggtgattacggcagaagccgcaacagaattaggccagctgtgcaacagctacccgggcattgccgtttgcgtggagccggaatcggttcctgcgctggtgaccggaattgagcaggcactcgccatgccaaaagagaacacggtggcacgtgaatatgccgaacgcacgctcgagaaagagaacgtgctgagccaatttattgcagatatacggggataaatcatgagtcaaaccactttgtatccggtcgtaatggcgggtggatccgggagccggttgtggccactgtcccgcgtgctttatccaaaacaatttctgtgcctgaaaggcgacctcaccatgctgcaaacgacggttaaccgtctgcacggcgtggagtgtgaaagcccggtggtgatctgtaacgaacagcaccgctttatcgttgccgagcagctgcgccagctgaacaaactgaccgaaaatatcattctggagcctgccggacgcaacacggcgcctgccattgcccttgcggcgctggcggcaaaacgcagcagcccggactgcgacccgctgatgctggtgctggcggctgaccacgtcatccagcaggaagaggccttccgcgatgcggtacgcgccgcgattccttacgctgagaacggcaagctggtgaccttcggcatcgtgccggatctcccggaaaccggctatggctacattcgccgcggcagcgttacgcctggtgaaggcgacagcgtggcctttgacgtggcgcagtttgtcgaaaaaccgaatctggaaaccgcgcaggcgtacgtggccagcggggaatactactggaacagcggtatgttcctgttccgcgccggtcgctacctggaagagctggaaaaatatcgcccggatatcttgcgcgcctgcgaaaaagcgatggcggtggtggatccggatctcgattttatccgtgtggacgaagaagccttcctcgcctgtccggaagagtccattgactatgcggtaatggaacgtacggcagatgcggtagtggtacctatggatgcgggctggagcgacgtcggctcctggtcgtcactgtgggagatcagcgcgcataccccggagggtaacgtccatcacggggatgtgatcagccacaaaacggaaaacagctacgtctacgccgaatctggcctcgtcaccacggtaggggtgaaggatctggtggtcgtgcagaccaaagacgcggtgctgattgctgaccgtaatgccgtgcaggacgttaaaaaagtggtggagcagatcaaggccgatggccgccacgaacaccatattcaccgcgaagtctaccgcccgtggggcaaatatgactccatcgacgccggcgagcgttaccaggtgaaacgcatcaccgtgaagccgggagaagggctgtcggtgcagatgcaccatcaccgcgccgaacactgggtggtggtggcggggaccgccaaagtgaccatcgacggtgaagtgaagctgctcggtgaaaacgagtccatttatattccgctgggggcgacgcactgtctggagaacccggggaaaattccgctcgacttaattgaggtgcgttccggctcctatctggaagaggacgacatcatccgcttccaggatcgctacgggcgcgtgtagcactccgcatcatgcccggtggcgctgcgctttccgggtctacgaatgacaaaaattaatttggccattacatggtcagggccaactgttgcctgaaaaaggggtcatcatggaannnnnnnnnnnnnnnnnnnnnnnnnnnnnnnnnnnnnnnnnnnnnnnnnnnnnnnnnnnnnnnnnnnnnnnnnnnnnnnnnnnnnnnnnnnnnnnnnnnnnnnnnnnnnnnnnnnnnnnnnnnnnnnnnnnnnnnnnnnnnnnnnnnnnnnnnnnnnnnnnnnnnnnnnnnnnnnnnnnnnnnnnnnnnnnnnnnnnnnnnnnnnnnnnnnnnnnnnnnnnnnnnnnnnnnnnnnnnnnnnnnnnnnnnnnnnnnnnnnnnnnnnnnnnnnnnnnnnnnnnnnnnnnnnnnnnnnnnnnnnnnnnnnnnnnnnnnnnnnnnnnnnnnnnnnnnnnnnnnnnnnnnnnnnnnnnnnnnnnnnnnnnnnnnnnnnnnnnnnnnnnnnnnnnnnnnnnnnnnnnnnnnnnnnnnnnnnnnnnnnnnnnnnnnnnnnnnnnnnnnnnnnnnnnnnnnnnnnnnnnnnnnnnnnnnnnnnnnnnnnnnnnnnnnnnnnnnnnnnnnnnnnnnnnnnnnnnnnnnnnnnnnnnnnnnnnnnnnnnnnnnnnnnnnnnnnnnnnnnnnnnnnnnnnnnnnnnnnnnnnnnnnnnnnnnnnnnnnnnnnnnnnnnnnnnnnnnnnnnnnnnnnnnnnnnnnnnnnnnnnnnnnnnnnnnnnnnnnnnnnnnnnnnnnnnnnnnnnnnnnnnnnnnnnnnnnnnnnnnnnnnnnnnnnnnnnnnnnnnnnnnnnnnnnnnnnnnnnnnnnnnnnnnnnnnnnnnnnnnnnnnnnnnnnnnnnnnnnnnnnnnnnnnnnnnnnnnnnnnnnnnnnnnnnnnnnnnnnnnnnnnnnnnnnnnnnnnnnnnnnnnnnnnnnnnnnnnnnnnnnnnnnnnnnnnnnnnnnnnnnnnnnnnnnnnnnnnnnnnnnnnnnnnnnnnnnnnnnnnnnnnnnnnnnnnnnnnnnnnnnnnnnnnnnnnnnnnnnnnnnnnnnnnnnnnnnnnnnnnnnnnnnnnnnnnnnnnnnnnnnnnnnnnnnnnnnnnnnnnnnnnnnnnnnnnnnnnnnnnnnnnnnnnnnnnnnnnnnnnnnnnnnnnnnnnnnnnnnnnnnnnnnnnnnnnnnnnnnnnnnnnnnnnnnnnnnnnnnttggggagaggggtagggtgaggggtaaggtttagaactaaaggaacaacgatgacaaatctaaaaaagcgcgaacgagcgagaacgaatgcatcgttaatctctatggtgcagcgtttttctgatatcaccatcatggtcggcggactgtgggcggtgtgttgggtcagcgggcagtcgttcttatacatgcacttgctgatggcgttgattgcgctggtggtgtttcagatgatcggcggcatgaccgatttctatcgttcatggcgcggcgtcaaaatgaccaccgaactgatgctgctgcttcagaactggaccttaagcctggttttcagcgcagggctggtggcgttcagccatgattttgataaccgtcttgtgacctatctctgctggtatctgttaaccagcattggcatggtggtctgccgctcgctgatccgctttggcgcgggctggctgcgcaaccgcgggtataaccgtcgcttcgttgccgtggcgggcgacctgccggtggggcaggtgctgctcgacagcttccgcaaagagccgtggttaggttttgaagtggtcgggatttatcacgacgcgaagcccggcggcgtgccgtccgactgggcaggtaactacgaacagcttatcgacgatgcgaaagccggcaaaattcataacgtctacatcgccatgcagatgaaagatgaatcccgcatcaagaaactgatgcgcgagctggcggataccacctgctcggtgatcctcatcccggatgtcttcaccttcaatattctccactcccgtattgaagaggtgaacggggtaccggttgttccactgtacgacacgccgctgtcggggattaaccgcgtgctgaagcgcgtggaagatatcgtgctttcgtccctgatcctgctgctcatctccccggtgctgtgctgcattgcgctggcggtgaagctcagctcgccggggccgatcatcttccgtcagacccgctacggcatggacggtaagccgatcatggtgtggaaattccgctctatgaaggtgatggagaacgacaaggtggtgacccaggcgacgcagaacgatccgcgcgtcacccgcgtgggcaacttcctgcgccgtacctcgctcgatgagctgccgcagttcatcaacgtgttcaccggcgggatgtccatcgtcgggcctcgtcctcacgccgtggcccataacgagcagtaccgcaccctgattgaaggctacatgctgcgccataaggtgaagccaggcatcaccggctgggcgcagatcaacggctggcgcggcgagaccgacacgctggaaaaaatggaaaaacgtatcgagttcgatctggagtacatccgcgagtggagcctctggttcgatatcaagattgtttttctgaccattttcaaaggcttcgtgaacaaagcggcgtactaagatgagcttacgagaaaaaaccatcagcggcgcgaaatggtcagccatggccaccatagtcatcattggcctcggcctggtgcagatgacggtgctggcgcgcattatcgataaccaccagtttggtctgctgaccgtctcgctggtgattatcgccctggccgatacgctgtcggactttggtatcgccaactccattatccagcgcaaggagatcagccatctggagctgaccaccctctactggctgaacgtcgggctggggatcttcgtgttcgtactggtgttcctgctgagcgatgtgattgccggcgtgctgcataacccggacctggcgccgctgatgcgcaccctgtcgttcgctttcgtggtgatcccgcacgggcagcagttccgcgcgctgatgcagaaggagctggagttcaacaaaatcggcatgattgaaaccagcgccgtgctggcgggctttaccttcaccgtggtcagcgcccatttctggccgctggcgatgaccgccatcctcggctacctggttaactctgccgtgcgcacgctgctgtttggcttctttggccgtaagatttatcgcccggggctgcatttttcgctggcgtctgtttcatccaacctgcgcttcggcgcgtggctgacggcagacagcattatcaactacgtgaatactaacctctccacgctggtgctggcgcgcattctgggcgcgagcgtcgcgggtggctacaacctggcgtataacgtcgcggttgtcccgccgatgaagctcaaccctatcattacccgcgtgctgttcccggcgttcgccaaaattcaggacgataccgaaaagctgcgcgtgaacttttacaagctgctctccgtcgtggggatcatcaacttcccggtgctgctggggctgatggtggttgccagcaatttcgtaccgctggtgtttggcgagaagtggaacagcatcatcccgatcctgcaactgctgtgcgtcgtggggctgctgcgctcggtggggaacccgattggttctctgctaatggcgaaggcgcgcgtggatatcagcttcaagttcaacgtgtttaaaaccttcctgtttattccggcaattattgtgggcggccacatggcgggcgccattggcgtgacgctcggcttcctgctggtgcaaatcgtcaataccgtgctgagctacttcgtgatgatcaaaccggtgctgggctccagctaccgtcagtacatcctcagcctgtggctgccgttctatctctccttaccgacgcttgcggtgagctacggcctgggcgtggtgctcaacgggcatctgccgctggcggcgctgcttgcggtgcaggtcgcggcaggcgcgctggcgttcgccgtgatgattgtgctgtcacgcaatgcgctggtggtcgagatgaagcgccagttttgccgtaacgaaaaaatgaaaacgctgcttcgcgcaggctaattttacgaggccattatgaaattacttattcttggcaaccatacctgcggcaaccgtggcgacagcgccatcctgcgcggtttactggatgcaattaacacccttaagcctgagacagaagtggatgtaatgagccgttatccggtcagctcatcctggttactgaaccgcccggtgatgggcgacccgctctacagccagatgaaacagcacaacaacgccgcgggcgtgatggggcgcgtgaagaaagtgctgcgtcgccgctaccagcatcaggtgctgctttcccgcgtgaccgacaccggcaagctgcgcaacattgccatcgcgcagggctttaccgattttgttcgtctgctgtccggctatgacgccattattcaggtgggcggttcgttcttcgtcgatctgtacggcgtgccgcagtttgagcatgcactttgtacgttcatggcgaaaaagccgctgtttatgatcggccacagcgtcgggccattccaggatccgcagtttaaccagctggcgaactatgtcttcggccactgtgacgcgctgatcctgcgtgaatcggtcagcctcgacatgatgaaacgcagtgaaatcgacaccaccaaagtggagcacggtgtggacaccgcctggctggtggatcatcaggatgacagtttccaggccagctacgcggtacagcactggctggacgtggcggcaaagcagaaaaccgtcgccattaccctgcgtgaacttgcgccgttcgataaacgcctcggcacgacccaggcggcgtacgagaaagcctttgccgacgtggtgaaccgcgtgctggacagcggttaccaggtgctggcgctttccacctgtaccggtatcgacagctacaacaaagatgaccgtatggtggcgctcaacctgcgcaacctggtgaacgatccgtcccgctatcacgtggtgatggacgagctgaacgatctggagatgggcaagctgctctccgcctgcgacctgaccgtgggcacgcgtctgcattcggccattatctcgatgaacttcggcacgccagccatcgccattaactacgaacacaagtccgcgggcattatgcagcagctcggcatgccggaaatggccgtcgatattcgtcatctactggacggatctctgggggcgatggtgggcgacacgctcggtcagctgcctgcgatcaacgaacgtctggcggtggcggtaaaagccgaacgcgaaaaaggtattggcatggtgaaatccgtactcgaccgcgtccgggaggggaaatgaaggttggtttcttcttactgaaatttccgctgtcgtctgaaacctttgtgctgaaccaaatcaccgcgtttatcgatatggggtatgacgtggagattatcgccctgcaaaagggcgatacgcaaaacacccatgcggcgtatacccggtatgggctggaggcgaaaacccgctggttgcaggatgaacccaccggacgaatgaacaaactgcgccatcgcgccagccagacgctgcgcggcctgcatcgcgcctcgacgtggcgggcgctgaatatgtcgcgctatggggcggaggcccgcaacctgatcctttccgccatttgcgggcaaacggcccagccgtaccgggccgatgtctttatcgcccactttggcccggcgggcgtaacggcggcaaaactgcgtgagctgggggtgattgacggcaaaatcgcaaccattttccacggtatcgacatctccagccgggaagtactgaaccactacacacctgaatatcagcagctgtttcgccgtggcgacatgatgctgccgataagcaacctgtgggccggacgcctgaaaaccatggggtgcccgagcgagaaaatcaccgtttcacgcatgggcgtggatatggaacgtttcactcagcgaccggttaaggtgccgggcaagccgctgcaaattatctctgttgcccgcctgaccgaaaagaaagggctgcatgtagccatcgaagcctgtcgccagctgaaggcgcgcggcgtggacttccactaccgcatcctgggtatcgggccgtgggagcgtcgcctgcgcacgctgattgaacagtatcagctggaagacgtggtcgagatgccgggcttcaagccgagccacgaagtgaaagccatgcttgatgatgcggatgtattcctgctgccttccgtaaccggcgccgacggcgatatggaaggtattcccgtggcgctgatggaggcgatggcggtcggcattccggtagtctcgaccctgcacagcgggatccctgagctgatcacctctgaatactccggctggctggtccctgaaaacaatgcgctggcgctggcggatcgtatggctgcgttcagtgatatcgatcagcagacgctgatccctgtgctgcaaaatgcgcggcaaaaagttgaagcagaattcaatcagcaggtgattaatcgccagttagcgagcctgctgcaaacgctgtaacgctgaggttgtatgctgaaaaagattacccgacgccgatttgtctcttctttatccgtcctggctgccatgccgctgctgtcgccccgcgctgtgcgggcggcaaccgggaagacggtttctgtcgatcgctacaacaatcacgactggaacgccgcctttaagcaggcatttaccgagggcgataccgttgttgttcccgccgggttaacctgtgaaaacatcaataccggcattttcattcctgatggcaaaaccctgctgatccgcggtgcgctgaagggcaacggccgcgggcggtttgtgctccaggaaggctgtaaggtcattggggaaggagaggggcgcacgcataacattacgctggacgtgcgtggctccgactgtgtcattaaagggctggcgatgagcggcttcggccccgtcacccagatctacatcggcggtaaaaagccgagagtgatgcgtaacctgcttatcgatcgcattgccgtgagccaggccaactacgccattctgcgccagggttttcataatcaggtggacggtgcgcgcattaccaacagtaaattcagccacttgcagggggacgcgattgagtggaacgtggcgattaacgaccgcaatatcctgatctctgaccacgtgatcgataacatcaactgcacaaacggcaagatcaactgggggataggcattgggctggctggcagcacgtacgacaatgactatccggaacagcagaccgttaaaaacttcgtggtggcaaatatcaccggcagcaactgtcggcagttggtccatgttgaaaacggtaaacactttgtgatccgtaatatcaaggccagcaatattactcccgacttcagtaaaaaggccggaattgataacgcaacggtagctatttatggctgtgataatttcgttattgataatatcgatatggtgaacagcgccggaatgttaatcgggtatggcgtgatcaagggcgattatctgtcgataccgcaaaacttcaaacttaacgatattcgcctggataaccgacagcttgcttataagctgcgcgggatacagatttcctccggcaatgccacctcgtttgttgccatcaccaacgtcaacatgcagcgagcaacgcttgagctgcacaacaagccacagcatcttttcttacgcaatatcaacgtgatgcaggagtcagcgacgggaccagcgcttaagatgaacttcgacttgcgcaaagacgtgcgcgggaagtttatggccaaaaacgagacgctgttgtcgctcgcgaacataaaagcggttaatgaaaaggggcagagttcggtggatattgatcgggtcgatcaacacgtggtgaatacggaacggttgaattttgcgctgccgcacaggtaatcctacagcctattttgcgactattcctggtatggaatcgcgatctattcagattacaactactgtaatttgtggtggggtgacctaggattacttcatatttacggcaaaacatgctggcgaaaacaggtttaaaagctataattcgtcaaccattttaaggtggaagaaataatgattaatttgaaagcagtcataccggtagcgggtttgggcatgcacatgttgcccgccacaaaggccattcccaaagagatgctgccgatcgttgacaagccgatgattcagtacatcgtcgacgagattgttgctgcggggatcaaagaaatcgttctggtgacgcactcttctaagaatgccgttgagaaccacttcgacacctcttatgaactcgaggcgctgcttgagcagcgcgttaagcgccagcttctggcagaagttcagtctatctgtcctcctggcgtgaccatcatgaacgtgcgtcaggcgcagccgctgggtctggggcactcaatcctctgcgcgcgcccggtggtgggtgataacccgttcatcgtggttctgccggacatcattattgataccgcttccgccgatccgctgcgttacaacctggcggcaatggtcgctcgcttcaacgagacgggccgcagccaggtgctggcgaaacgtatgaagggcgatctctctgagtattccgttattcagaccaaagagccactggagacggaagggcaggtgagccggatcgttgagtttatcgaaaaacccgatcagccgcagagcctggactctgacctgatggcagtcggccgttatgtgctgaatgcggatatctgggctgagctggaaaaaaccgagccgggcgcctgggatcgtatccagctgaccgatgcgattgctgagctggcgaagaagcagtcggttgatgcgatgctgatgaccggcgacagctatgactgcggtaagaaaatggggtatatgcaggcgtttgtgaactatggcctgcgtaacctgaaggaaggggcgaagttcagaagccggattgagaagctgctggctaacgactaatacttcttccgcagcctgaaagacttcatgcgcggcagccatcatcttgttatgttgttacataactaaaatgatggctgccgctttttgctattaattcctataataacagagagttatctgcttcaaatctgggctgatttgtaacgatttgtgcttgtttccgaatccatttaggacgacaattaacgccagtttttgtctgaaatcagacagtcaatcttatattcaacacgcgctcagtgcactggtagctgtcaagccaggggcggtagcgtgcaaaatttctaatcctgaattattaccagggttcagaacgccaatatctcgacatatctacaaaacggaatagataacgtgaaaattcttgtgacgggtggggctggctttataggctcagcggttgtacgacatattattacaaatacccatgacgaagtcgtcaatgtggataaactgacgtatgccggcaaccttgagtcccttaacgatgtcagcgccagtgaacgttatgtgtttgagcatgcagatatttgtgataaagcggctatggatcgtatttttgctgagcataatccggatgcggtaatgcatctggcggcagaaagccacgtagaccgttccattaccggcccggcggcattcattgaaaccaacattgttgggacatatgtgcttctggaagctgcccgtgcttactggtcaacgctcgatgacgcggcgaaaaaagcgtttcgcttccatcatatctccaccgatgaagtgtacggcgatctgccgcacccggatgaacacccggcatcctcagagcttccgctgttcactgaaaccactgcctacgcgccaagcagcccatactctgcctccaaagcgtccagcgaccatctggttcgcgcctggctgcgcacctacggtttcccgacgattgtcaccaattgttcaaacaactacggtccgtatcatttcccggaaaagctgatcccgctggtgatcctgaacgcgctggacggaaaagcgctgccgatttatggcaaaggcgaccagatccgcgactggctttatgttgaagaccatgcccgtgcgctttataccgttgttactaagggtaaaccgggtgaaacttacaacatcggtggtcacaacgaaaagcagaacctggacgttgtgcacactatttgcgatttgctggatgagatcgtgccgaaagaaggctcttaccgcgatcaaattacttatgttgccgatcgtccaggacatgaccgccgctatgcgattgatgcgcataaaattggggtggagctgggctggaagcctgaggagacgtttgaaagcggaattcgtaagactgtggaatggtatctgagcaatcaggagtgggttaacaacgttaaaagtggtgcttataaaacctggatcgaacagaactacggggaacgtcaataatgaacattcttctgttcggcaaaacagggcaggtaggctgggagcttcagcgcgcgctagctccacttggcaatctgattgcgcttgatgtgcattctaaagattactgcggtgatttcagcaacccggaagggattgctgagacggttcgtaatataaaacctgacgtgatcgtcaacgcagccgcacataccgcagtggataaagcagagtcggaaccagattttgcgcagttactgaatgcgacaagcgttgaggctatcgcgaaagaagctgcaaagatcggcgcctgggttgttcactactccacggattacgtcttcccgggtgatggtgaaaccccctggagtgaaacggatgcgacggcaccgctgaatgtttatgggcagacgaaactgaatggcgaaaaagcattgcaggataactgccctaatcacctgattttccgcacaagctgggtatatgcaggtaaaggcaacaattttgccaagaccatgctgcgtctggctaaagaacgcaaagaactttctgtcattaacgatcaggtgggtgccccaacaggcgctgagctattagccgattgtaccgcccacgccattcgtgtcgcgatggtgaatccagaagttgccgggctttaccatctggtcgcttctgagacgacaagctggtatgactatgcggcgttggtgtttgaggaagcccaaaaggcaggcattgagttggctatagaaaagctgaatgctgtaccaactacggcatatccgacgcctgcgcgtcgcccgcataactcacgcttaaataccatgaagttccagcagaacttcaacctggtattaccagcatggcatgttggtgtgaaacgtatgttggctgagctttttacggcgcaatccatttaatcattaaaaaatgcccgtttacgggcatttcgtgtttatagagaaattataatggctacacgtaaaggtattatccttgccggcggatccggcactcgtctctaccctgtgaccatggctgtaagcaagcaactgctgccaatttacgacaaacccatgatttattacccgctgtctacgcttatgctggcagggattaaagatattctgatcatcagtacgccgcaggatactccgcgctttgaacagctgctgggggacggtagccagtgggggttaaaccttcagtataaagttcagccaagcccggatggactggcacaggcctttatcattggcgaagagtttattggtgacgatagctgtgcgctggtgctgggcgataacattttctatggtcatgacttgccgaaacagctggaagccgcaattggtaaaggtgacggtgcaacggtatttgcctatcacgtcaacgaccctgaacgttatggcgtggtggagttcgataaagatggtacggcaatcagcctggaagagaaaccgctcaagccgaagagcaattatgccgttacgggactctatttctacgataacgatgtagtggaaatggcgaagaacctgaagccttctgcacgcggtgagctggaaattaccgacatcaaccgtatttatctggagcaggggcgtttatccgttgcgatgatggggcgtggctatgcgtggctggatacaggaacccaccagagcctgatcgaggcgagcaactttattgcgacaattgaagagcgtcagggattgaaagtgtcctgcccggaagagatcgcgtatcgaaaagggtttattgatgcagagcaggtgaagaaactggctgagccattgaaaaaaaatgcctatggccaatacctgttgaagatgattaaaggttattaagacatgaacgtaattaaaactgatatccctgatgtgctaattttgaaccaaaagtatttggtgacgatcgtggttttttctttgaaagtttcagccagaaagtgtttgaagaggcggtagggcgtaaagttgaatttgtgcaggataatcactcaaaatcctgcaaaggtgttctgcgtggcttgcattatcaactggaaccgtatgcacagggcaaactggtacgttgtgttgctggtgaagtttttgatgttgcggttgatattcgcaaatcctctccaacttttgggaaatgggttggtgtgaatctttctgctgaaaataaacgacagctttggatccctgaagggtttgcacacggatttttggtattaagtgatacggctgagtttgtatacaagacaacaaattactaccatccaaaaagtgaaagaagtattcattggaaagattcagaattaaatatttcttggcctgatacggctgaaataatcatttcagaaaaggacaaaaaggcattatctttcaacagttgtgaatacacaaactaacaagaaaatgcgcaaattaatatcaaataataaatttttacaaagcgttgcgataatagcgtcgggtacagctttggcgcaaataattaacttggctgctattcctctcattactcgtctttatggcccagaggcatatggaatgatgggaagttttatgtcgatcgttaacgtattgattcctttatctgcattaagctacccaattgctgtagttctaccaagaaaagattcagtttcaaatataattgtacggttaagtttgatactaggaattgctacatccgtgacggttctaattggaatgattctatatacactcctaaaacacgatattggcatgccaatatggtatatagctgtcattcctcttactatgcttgttcttcctcttcagcaatgtggacagcaatggctcataaggaaaaaacaatatagtgcaattgctaaagtttctgtcattcagtctgttgtacttaacgcattaaaaataataattggattacctttgcatggcgttaaaacgttagtaataattactgcattaggctattggctacaggcattacaatttttctacaatgcaaaaaaaaatggccttgtgatagttaaagataatttttttcgtaatttaacaaaggtaagtcgtgcgtacgctgactttcccgtatatagaactcctcaagtactggttaatgcgctttcacaaagtttgccaatattcgtaatagggttttattttggggctactcaggttggttattttagtttagcacaaacaatacttggagctcctgtaacactgctcactggtgcattaagtaatgttttatttcctaaaattacgcaaaaagttaataacagagaattaatttcgccattaataaaaaaatcttttttgggacttatcgctttatcaacgtcaatatatataacagtgatattatttggtccgcaattattttcttttgtttttggacatgaatgggaagttggtggcgcctatggtagatggatggcactttattgtattttttggttatctgccagaccagctattgatgcgattccatctttgaaaatacaacgccaattcttaatatatgaggtatgctcgcttttgcttaggtttacaggtttgattgccggcataatgatttataacgacagcatttttgccatgattttatattctatcataaatgcgctttgttatttttctttatcattatttgtattatggaaatctaaacaatatgagcggaaagtatttagatcctgtagttagagctgaaaatatgcaattgcaagaaaacaatactgcaaaaaaggctaatgcaattataataaatttattatttggaatttgtattcttgcagtttcatttcgcgtactgattgtagctgtcatcatgctagcagtctgtgctttatggtctttatttacattaaaagcatccctaagaaccttcgcaatnnnnnnnnnnnnnnnnnnnnnnnnnnnnnnnnnnnnnnnnnnnnnnnnnnnnnnnnnnnnnnnnnnnnnnnnnnnnnnnnnnnnnnnnnnnnnnnnnnnnnnnnnnnnnnnnnnnnnnnnnnnnnnnnnnnnnnnnnnnnnnnnnnnnnnnnnnnnnnnnnnnnnnnnnnnnnnnnnnnnnnnnnnnnnnnnnnnnnnnnnnnnnnnnnnnnnnnnnnnnnnnnnnnnnnnnnnnnnnnnnnnnnnnnnnnnnnnnnnnnnnnnnnnnnnnnnnnnnnnnnnnnnnnnnnnnnnnnnnnnnnnnnnnnnnnnnnnnnnnnnnnnnnnnnnnnnnnnnnnnnnnnnnnnnnnnnnnnnnnnnnnnnnnnnnnnnnnnnnnnnnnnnnnnnnnnnnnnnnnnnnnnnnnnnnnnnnnnnnnnnnnnnnnnnnnnnnnnnnnnnnnnnnnnnnnnnnnnnnnnnnnnnnnnnnnnnnnnnnnnnnnnnnnnnnnnnnnnnnnnnnnnnnnnnnnnnnnnnnnnnnnnnnnnnnnnnnnnnnnnnnnnnnnnnnnnnnnnnnnnnnnnnnnnnnnnnnnnnnnnnnnnnnnnnnnnnnnnnnnnnnnnnnnnnnnnnnnnnnnnnnnnnnnnnnnnnnnnnnnnnnnnnnnnnnnnnnnnnnnnnnnnnnnnnnnnnnnnnnnnnnnnnnnnnnnnnnnnnnnnnnnnnnnnnnnnnnnnnnnnnnnnnnnnnnnnnnnnnnnnnnnnnnnnnnnnnnnnnnnnnnnnnnnnnnnnnnnnnnnnnnnnnnnnnnnnnnnnnnnnnnnnnnnnnnnnnnnnnnnnnnnnnnnnaaagtagtattaatccaagggacgatcgaaataggtggcttgtcattgttagcagcaaggattttgggaaaacatacttcgacttatcttccgataactaaaaaaagcaaagaaattggggtggtatttggaaggataagagattttataaataagcatttctactatcgtttacctcatgaaattatcacaatttcagaatttaacaaagaagagttgattaataattttaatgtagatgcttccaggataagggtagctatgaacttcattgataccccttcatatccgaaacaaactaatgatagtcaaagaaataatgttttactaatcattggtagaatagatcttaatcaaaaaagacaagatttgttcctcgattattttgttagaagtgaattatctgatgctttcgaggtacacataattggcgatgggaatgacgacgcttctaaagcggtaagaaataaatacggtagcatgcataatgtgtttttctgtggttggttgggatcagaagatgttgcccaccgcttggctcaatgcagaagtgtaattattccttcaaaatttgaaggggtaccgcttgttatgatagaggctatcaaattaggaaaaacggttatagcaagcaatgttgatggaatgaaagaatttttacctccacaatggttgttcgatgtcgacgaaatgagtgattcattaagaatcatttcatatttgaatgaaagaccacaggtatttgatgatttacttccagtggtacaaagaaaatttaatcagattttcgatccgattgaaaattcaaaaaaatttatgatgctaattaatagtagaaagtaactaatgaatatactccttgactgtaggttaatcagtgatcgtccaactggaatttcgcggtattcagaaaaaatgttggaatattacattgataaatatggaatggataaaatccatgcgttagtaaacaaaaaaatcgtaaaataatctgtaaacagattgttaccagcctaaagccattcaacataggccattggctgatgtttccgttatggcttaagaaaactaattattcatgggtgattagttttcattattctggtctagcataccctttaaaaaatgtcaggtctgtaataacagtgcatgatcttatgtttgaactagtgcccaattttttcaatactaaattaaaaaatcttattgggaagttctattatcgtattattgtaaaacaaagcataaggaattccgatataaccataagtgtatctgaaactactagagaggatatatctaagttatataaagaggattctgaaataagcggtgagggtatatttttacaagcagaaagtgatgattctattttaagagaaaaaaatttagaaccaaataattatttcttatatatagggaataataggcctcataaaaatatagattttttaaaggagtgctttcgtaattccaagctaaaacataatttaaaaagcaaattagttttagttggacatacagggcaaagtgatgaagacataatttatccaggaatactcagtgatgaacaaattgtagggctttatagaaatgcgaaggcattcgtttttccgtcaaagtatgagggttttggtctgcctattttagaggctttagataataaatgcccggttatagcgtccgatatacctgcattcagagaattttcaaacagtaatataacttatttcaaattggcagataaagccgcactggttgacatattgagtcgggactataaatttgatgaatctgaagctcaagaaattattaacagatacagttggcctcaaacttataaaaacttagaccgaatttttggtggccttatatgaaagagatcattatagtacatgattttgatggtagaccctatttcaaggcgcttgagaaaaattttcactgtaaatttatcaatagcagaccgataagattcttgttacgtgatcttataaaaaagaaaaaaatcactaaagattccatcgattcacttctatttttatttctgttacctttccataaaaatcaaaccataattttgggtatggctccttttaatttcaggttgctaatttatggtatcctttgttatcgcaataaactactgttacattcttcctggcatcaatggttaggaaaaactccattttcatatccgaagattattaataaaattctcaaaaaagcttggcgtcattaccttcctagattttcgaggataattgctgtaactagagcaaccaagcggtcaatattggatttcgcatatcctatgcaattgaatattgacgtcattccacatgtggtagacattgagcctatagctagaaccgagttagaccaaaaatgggattctaaggatattcaaggattatttgttggtcgacttactccagaaaaaggtatcaaagatataattgatatcgctgaaaaaaatgcagtcaggtgtattgcaaaattctaatataaaaattgctggcaaaggaaatcttgagaacgacgtagttaccgcgagcaaaaacatttccgggttgtcttatataggctacataacttcacgggaagaacttaaggatcatatgaggcgatctaattttttcttgcttccttcaaaaaagataaaaggatgggaagagttatttggattagttattgttgaagctatgagtcaaggatgtgttgtaatagcttccaagcacataggacctcaagaaattatcgaagaccatgaagatggtatcctttgtgaagaaaatgaatttataactcaaaccttacggaactttaatgagtttcatgcagatatttctcgttataaagaaatttcagtgcatgcacttgataaaagtcaaaaatataatatgaaaaatatttctcatctttggtctgaactcattaacaatctggaaagataaggctttatatgaccgtttttattagtgttgtatcacatggacatgcagaacttataaaaaaaatagattgtcttgcgtcactttcaaatatttttaaagtcattcttaaatgcaataagagcggtgacgccgaatcgctttgcgaatatgcaaattcccataatatgcttctacttaatgaagcatatggattgggcttcggtgaaaataataactatgtattcgactattgtttaaaacaactaggaatgaacaataatgattatttcattgttttaaacccagatgtcaaaattgatccggacactcttacaaacttaatcgagcatatggacgttgatgagagtagcttagcttcgattaatctatataaaaatgctgagatgactgtttatgataattcgataagaaaatttccggggtttattgacttcttttcatcattcattttgaaaaaaaacaatgtcatatataataaagatcatgtaactgctccaactaatgttgaatgggctgcggggtcttttttagcctttaaagtaagccattatgctttgcttaaaggtttctcagataaatattttatgtattgtgaggatattgatatatgttatcgttctcatctatataatgtacctgtaagatactatcccgaagttaaagctatccattttgcaaaacatgccaacagaagcattttttctaagcatttctggtggcatgtaagcagtattttgaaattcttatgctttaaatataataataggattaaaagatgattataccagtaattatggctgggggtagcggtacccgcctttggcctatgtctcgctcgctttttccaaagcaatttctagatctgttctctaagggaagcttactccagaatacacttaatcgcttaactgataaagattacggaactccgataattataacaaataatgagtatcgttttttagttaaggagcaaattaaaaaaactaaacatcctgattcgcaaataattctagagccagccgcaaggaatactgccccagcaatagcgatttctgcattcagttctattaaaaatggagctgatcctcttttgctagtaatgccctcagatcatctcattaaagatgagatgcaattctcagaaagcataaaaaaagcgcgtgaatatgctgaaaagggctttttagttacattcggtattaagcctacctcgcccgaaactggatatggctatattaaagcaagtggtaagatcggtgaaggaatatacgatatagaacgcttcgttgagaaacctagcttaaataaagctattgagtatatttcagatgataagtatagctggaatagtggtatctttctttttaaagcttcaacttttcttcaggaaataaatgcttttcgaccagaaatttatgagtcctgcttgaagtctgttaataatgcaattactgatcttggtttcttaagagtagagcctactagtttcgctcattgcccctctgattcaattgactttgccgtgatggaattgacaaagaaaggtgttgttgtgcctgtagatattggttggagcgatgttggttcctggagtgcactatgggaagttagtaataaagatgacaataataacgtctctaacggtgatgtctatttgaatgaaacttccaatagttatatctattctaaagacagattcgttgcatgcgttggtgtcgatgacatcattgttgtagacacgagtgacgctttactcgtagtttctaaaaacaatgtgcaaaaggtcaaggatgttgttaatcatcttcaggtaaaaaatagaccagaatatcagaatcacaatgaacaattccgcccttggggtagtcatgaagttgtgagttctggtagtaaatacaatatcaagcgtgttgttataaaacctggtcatagtagttcagagcaaattcattataatagaacagagcattggattgttctttcaggcacagctttggttatgtgtggtgatgaaataaaaacagttaaagagaatgaatccacttttattccggctggagtaaaacataatttttcaaatccgggaaaaattgatttggaaattattgaagtgcaaacggggccatacctagcagaagacgatatttatagagaataaaattatcatgcagaaattaacctgttttaaagcctacgatattcgcggcaagctgggcgaagaactgaacgaagacattgcgtggcgcatcggccgcgcgtacggcgaatacctgaaaccacaaactatcgtgctgggcggcgacgtgcgtctgacaagcgaatctctgaagctggcgctggcgaaagggctacaggacgcgggcgtcgatgtgctggacattggcctttccggcaccgaagagatctattttgccaccttccacctgggcgtggacggcggtatcgaagtgacggccagccataacccgatggactacaacggcatgaagctggtgcgcaagggcgcgcgtcctatcagcggcgacaccggcctgcgcgacgtgcagcgtctggccgaggccaacgacttcccgccggtgaatgaagccacacgcggcagctataagcagattaacctgcaaaaagagtacatcgaccacctgctgggctacatcaacgtggcgaacctcaaaccgctgaagctggtgattaactccggcaacggcgcggcaggcccggttgtcgatgcacttgaagcccgctttaaggcgctgaacgtgccggtgaccttcgtcaaagtgcacaacacgccagacggcaacttcccgaacggtattcctaacccgctgctgccggagtgccgcgacgacacccgcaacgcggtgattgagcacggcgccgatatgggtatcgcctttgacggcgatttcgaccgctgcttcctgttcgatgagaaagggcagtttatcgaaggctactacatcgttggcctgctggcggaagcgttccttgagaaaaacccgggggcgaaaatcattcacgatccgcgtctttcctggaacaccgtcgacgtggtgaaggccgcgggcggcgagccggtgatgtccaaaaccggccacgcgtttatcaaagagcgtatgcgtgaggaagacgccatctacggcggcgagatgagcgcccaccactatttccgtgattttgcctactgcgacagcgggatgatcccgtggctgctggtgactgagctgctgtgcctgaaagggcagagcctgggtgaactggtgcgcgaccgcatggcggcgttcccggcgagcggcgagatcaacagcaaactggcgcagcccgctgaggccattgcccgcgtagagcagcactttgccattcatgcactggagattgaccgtaccgatggtatcagcatggcgttcccgcagtggcgcttcaacctgcgctcctccaacaccgagccggtggtgcgcctgaacgtggagtcccgggctgatgcgccactcatgaaagaaaaaacagaggaaattcttgcgttgctaagaaagtgattgtcaacgcctgcattttttggcggtttaaatgtaccaggattatgcaatcgatgtgacataggtcagcaaaagctattcttatcatccgatcctgagttaacatcagatacacatttcaagccgcgcaacagtcgcggcgaccacacctgacaggagtatgtaatgtccaagcaacagatcggcgttgtcggtatggcagtgatggggcgcaacctggcgctcaacatcgaaagccgtggttataccgtctccgttttcaaccgctcccgtgataagaccgaagaagtcatcgctgagaatccaggcaaaaaactggttcctttctatacggttaaagagttcgttgagtctctggaaacacctcgtcgtatcctgttaatggtgaaagcgggcgcaggtaccgatgcagctatcgattcactgaaaccgtatctggataaaggcgacatcatcattgatggcggtaataccttcttccacgacaccattcgtcgtaaccgtgaactgtctgctgaaggcttcaacttcattggtaccggcgtatccggcggtgaagagggcgctctgaaaggtccatccatcatgcctggcggtcagaaagaagcgtacgaactggtcgcgcctatcctgactaaaatcgcagccgtagctgaagacggtgagccatgcgtgacctatatcggtcctgatggcgctggtcattacgtgaaaatggttcacaacggcattgaatatggcgacatgcagctgattgctgaagcctactctctgctgaaaggcggcctgaacctctccaacgaggagctcgcagagaccttcaccgagtggaacaaaggcgagctgaacagctacctgatcgacatcaccaaagatatcttcaccaagaaagatgaagagggtaaatacctggttgatgtgattctggatgaagctgcgaacaaaggcaccggtaaatggaccagccagagctctctggatctgggtgagccattgtccctgatcaccgaatccgtatttgcacgttatatctcttctctgaaagaacagcgcgttgcagcatctaaggtgctgtctggtcctcaggccaaacccgctggtgataaagcggagttcgttgagaaagtccgtcgcgcgctgtatctgggtaaaatcgtctcttacgcgcagggcttctctcagctgcgcgcggcatctgacgagaataactgggatctgaactacggtgagattgcgaagatcttccgtgccggttgtatcattcgcgctcagttcctgcaaaaaatcaccgatgcttatgctgaaaatgcaggtatcgcgaaccttctgctggcgccttacttcaagcagattgcagacgaatatcagcaggcgctgcgtgatgttgttgcgtacgcggtgcagaatggtatcccggttccgaccttctccgctgcggtggcatattacgacagctatcgtgctgccgttctgccagcgaacctgattcaggcacagcgtgactacttcggtgcgcatacctataagcgtacggataaagaaggtgtgttccacaccgaatggctggattaatctgatttaactcagtctgatagcatggcccggtgagtctcaccgggctttttttatcgctttcaggcccatgttgacttactttctccagccaaccactcccattgccgcataaatcactgcatttatccctttctgaagcaaggcattcgtcttgacagttcctcaacttaagaggtaaaaacctcaacagttgtttattgcggtggtgtgcttacgcctccagaaactcaaacttgaagaagttaaacgaatgaaaataactatctccggaacaggctatgttggtctctcaaacggtattctgattgcacaaaaccatgaagtggttgcgctggatatcgtgcaggcaaaagtggacatgcttaaccagaagaagtccccgatcgtcgataaagagattgaagaatacctcgcgaccaaaccgctgaacttccgcgctaccacggacaaagaagacgcttaccgcgatgcggatttcgtcatcattgccaccccaaccgactacgatcctaaaactaactacttcaatacctctaccgttgaagcggtgattaaagacgttacggcaatcaacccgaacgcagtgatgatcatcaagtcgacgattccagtgggcttcaccaaatcgattaaagaagagttgggtattgataatgtcttcttctcgccggaatttctccgcgagggcagggcgttatacgataacctgcacccatcccgtatcgtgattggtgagcgttccgagcgtgcagagcggtttgctgcgttgcttcaggaaggcgcaatcaaaaaagatattccggtcctgttcaccgattccacagaagctgaggccattaagcttttcgccaatacctatctggcgatgcgtgtggcttatttcaacgaacttgacagctatgccgagagcttaggtctgaacacccgtcagatcatcgagggcgtgtgtcttgatccacgtatcggtaaccattacaacaacccgtccttcggttacggtggctactgcctgccaaaagataccaagcagctgctggcaaactatcaggcggtaccaaacaacctgatttccgccattgtggatgccaaccgcacgcgtaaggacttcatctcagattccattctggcgcgtcagccgaaagtggtgggtgtatatcgtctgatcatgaagagcggttctgataacttccgcgcttcttccattcaggggatcatgaagcgtattaaggcgaagggcgttcaggtgattatttatgaaccggccatgcaggaagatgagttcttccattcgcgtgtgatccgcgatctggatgcattcaaaaaagaagcggacgtaattatctccaaccgtatggcggaagagctggcggacgttaaagataaagtctatacccgcgatttgttcggcagcgactgattaatatcgtgatataaaaaaacccggcgctctgccgggttttttgtttttaaacgttatagaagttgcggtaccagttgacgaagtttttcacgccttctttgactgaggtttgtggtttaaacccaataacgtcatatagcgctttggtgtccgcactggtctccagcacgtcacccggctggatcggcatcatattttttaccgcttctttgcccagcgcctcttcaagtgcggtaatgtaatccatcagttcgacaggtgaactgttaccgatgttgtacacgcgatacggggcagaactggttgctggcgaaccggtttcgactgtccagtcggtatcggcctgaggaatgacgtcctgtaggcgaataatcgcctccgcaatatcatcgatataggtgaagtcgcgcttcatcttgccgtagttgtatacgtcgatgctgttgccttcaatcatggctttggtgaatttaaacagcgccatgtccgggcgtccccacgggccatagacggtaaagaagcgcaggccagtggtcggcagattgtacagatgcgaataggtatgcgacatcagctcattggcttttttggttgcggcatacagggatactggatggtctacggaatcgtcagtagaaaacggcatcttacggttgaggccgtaaacagaactggatgaagcatacagaagatgctgaaccttgttgtggcgacagccttccagcacgttcaggtgacctaccaagttcgcatctgcgtaggcatgcggattttccagcgagtaacgcacgcccgcctgtgcggcaagatggatcacgcggttaaatttctcattggcaaagagcgcagccatgccctcgcggtccgctaagtccagcttgtggaaggtgaaactctcggatttgagcagttcgaggcgagcgagcttgaggttagggtcatagtaatcattcagattatcaatcccaacaacttcatgccctgcatcaagcaggcgcttgctgacatgagaaccgataaagcccgccgcacccgttaccagaaatttcatagcttccctcattcacagtgttcttgttgatgtcccaggacatcagaatccgactatgatagcgcgtcgcacttcacttacataacccatctttccgatataactcatcggattcttatagaaaaatcgccagcaacagatacactatggaaacaagattgtttttgccctttttcatctgttagggattgtatgacgcacaacaacgataacctggtcacacgcaacaatgacccggagcaaattgatttactggatttagtgctacagctgtggcgtggtaagtgggtaataggagcattcgttgctgcttttatcgttctcgccgttatttatattactgtagccaaagagaaatggacgtcatctgctatcattgctcaacctgatgctgcacaaatagctacctattccaatgcgttgaatattctttatggcggtgctgcaccgtcgatgcttgatattcagaatcgtgcaatcggtcgtttcaactcttcgttctctgcattagcccaggcgcttgataatcaggaagatccagaaaaactgacaatcgagccgactgttaaaggacagggattacccttaacggtgacctatcagggcgagtcggctgaagcggctcaaaaacaacttgctcagtacatccagcaggtcgacgagcagacagcaaaagaactgacgcttgacctcagagacaacctcaagcagcagatcacaaccctgaacgactctcttctgaaccaggagaaagtggcacaggagcaaaaagatctgcgtatcaagcaaatttctgaggcgcttaagaacgcggaagcggcgaaaattagcacaccgcagctccagcaaacacaggatgnnnnnnnnnnnnnnnnnnnnnnnnnnnnnnnnnnnnnnnnnnnnnnnnnnnnnnnnnnnnnnnnnnnnnnnnnnnnnnnnnnnnnnnnnnnnnnnnnnnnnnnnnnnnnnnnnnnnnnnnnnnnnnnnnnnnnnnnnnnnnnnnnnnnnnnnnnnnnnnnnnnnnnnnnnnnnnnnnnnnnnnnnnnnnnnnnnnnnnnnnnnnnnnnnnnnnnnnnnnnnnnnnnnnnnnnnnnnnnnnnnnnnnnnnnnnnnnnnnnnnnnnnnnnnnnnnnnnnnnnnnnnnnnnnnnnnnnnnnnnnnnnnnnnnnnnnnnnnnnnnnnnnnnnnnnnnnnnnnnnnnnnnnnnnnnnnnnnnnnnnnnnnnnnnnnnnnnnnnnnnnnnnnnnnnnnnnnnnnnnnnnnnnnnnnnnnnnnnnnnnnnnnnnnnnnnnnnnncctgctgggcactgtagcgctcaaatcaatggttgataatgaggcctcccgtccgctggtcttccctggctcttattatcagaccaaaaagaacttactggacattgagaacctcaacgttaacccagacacgttacatgtctatcgttacgtaatgaaaccagatctgccaatcaagcgtgacagccctaaaaaggcccttaccctcatccttgccgttctcctcggcgggatcatcggttctgctttcatccttggccgtaacgcgctgagaaactacaagccacgagcctgatttacacaacaaaaaagaccgggtttccccggtctttttttatttatgccgtttccgcaaattctcaatcaccgtcgttaaatccagctcctgatcctgaagcagcaccagcaggtgatacatcaaatccgacgcttcgttcgtcagctcctcccgatcatgcacggtggccgccagcgccgtttcaacgccttcctcacccactttctgcgcaatacgcttggtgccgctggcgtacagtttcgccgtgtatgagctctcgggatccgctgatttacgctctgccagcagctgttccagctgatagaggaacagccactggtggctcgtctcgccgaagcagctgctggtgcctttgtgacaggtcggcccaatcgggttgaccagcaccagcagggtgtcgttgtcgcagtctggcgtaatgccgaccacattcaggaagtgacccgaggtttcccctttcgtccacaggcgctgtttggtgcgcgagaaaaacgtcaccttgccgctgtcgagcgtttttgccagtgcctcctgattcatgtatcccagcatcagcacttcgcctgaaacggcatgctgtacaaccaccggcagtaatccgtcagttttttcccagtccagctgcgcctgttgttgctctgttaacataccctgatctccacgccctggtcggccaggtacgtttttaactcaccaatattgataatctgtttgtggaacacggaggccgccagcgcgccgtccacgttcgcatcgcggaaggcgtcaaggaagtgttccatggtgcctgcgccgccggaggcaatcagcggaacctggcagaccgcgcgcacttttttcagctgctcgaggtcgtaaccgttgcgtacgccgtcctggttcatcatgttcagcacgatctcacccgcgccgcgtttttgtacttcctgcacccagtccagcgtctcccattgggtgacgcgcgtgcggctttcatcgccggtgtactggttaacgtgatatttgcccgtcgcggtatcaaaccaggtgtcgatccccacgacaatgcactgcacgccaaagcggtccgccagacgcgtaatcagctccggatctgcaagcgcaggggagttaatcgaaattttgtccgcaccgaaagagagaattttcgccgcatcgtcagcagatttaatcccgcccgccacgcagaagggaatatcaatcacctctgccacgcgcgccacccagcttttatccaccacgcggccatcgctggaggctgtgatatcgtaaaataccagttcgtctgcgccttcttcggcatagcgttttgccagtggaacgatgtcgccaatgatctcgtggttgcggaactgcacgccttttacaacctgaccatcacgcacgtccaggcagggaattatccgttttgccagcattgaatcgcctccttcaccgtaaatttgccttccagcagcgcgcgacccacgatcacgccacgtacaccggttccgcgcagagcggcgatatccgccaggtcgccgataccgccagaggactgaaacgccacctgcggataacgggcgcaaacctcttcatacagtgagacgttagagcctgcgagcgtaccatcgcgtgaaatatccgtgcacaggacgtgcttcagccctacggggagatacatcccgaccagctcttccagcgttacgccggagttttcctgccagccgctgaccgcgacctgcttgttaccctgcgcgtcaatgcgcacatccagcgccagcaccagcgcatccgcaccgaagcggcggaaccagcccttgacactttcaggatctttcacagcggtcgaaccgactaccacgcgcgccacgcccgcgtccagtaaggcggcaacatcggcttccgtacgcacgccgccgcccacctgcaccgggacgtccacgccagccaccagtgttttaagcagcgggatctggcgtttggccggatctttcgcgccggtcagatcgaccaggtgcaacacctcagcgccctcggcggcgtaagcctgtaaccgcggcagcgggtcgttgccgtagtcgcgctgctgtccgtaatcgccctggtggagacgaacaaccgtgccgtcaattaaatctaaagcgggaattatcatcacatctccaggaaatttttcagcagttgcgcaccggcggcgccggagcgttccgggtgaaactgcacgccgtaaaagttatctttctgcacggcggcggtgaacgcctcgccgtaattgcactgggcgatggtgtaggcattcacgggcatggcgtagctgtgaacaaaatagaagtacgcgccgtcttcaataccctggaacagcctgttgcccgccttcggataaacgcggttccagcccatgtgcggcagcggcaggccgtggtcggtcattttcggcacgtcttcttcaataatgcccagcagatcaacgccgttgctctcttcgctgcggcggccaagcagctgcatgccgaggcaaatgcccagcaccggttgagtacaggctttgatgagatccaccagctcgcgctcatggatctgatccatcgccgcctgggcggtgccaacgcccggcagaaagagtttatccgcacgcagcaccacgtccgggtcgcggctcaccaccggctcgtagccgtggcgcataatcgccgactgtacggagttcaggttggcgcatccggtgtccagaatcaccacgttcattacagcactcctttcgacgagggcagggcgtcaccttccacgcggatcgcctggcgcagggtacggccaaaggctttgaacaggctctcgacgcggtggtgatcgtttttgcctttggttttcaggtgcagcgtcaggcccatggtgtaagaaagcgagcggaagaagtgttccaccatctcggtgctgagatcgcccacgcgctggtaggtaaagtcggctttgtattccaggtgcggacgcccggagatatccatcgcgcagcgcgccaggcactcgtccatcggcagaacaaagccgaagcggttgataccgcgcttgtcgccgagcgccagcttcagggcttcgcccagcgccaggccggtatcttccacggtgtggtgatcgtcgatatacaggtcgcccttaacggtgatctccatacggaagccgccgtgagtggcgatttgatccagcatgtggtcaaagaaaccgacgccggtgtggatcttgctgccgccttcgcggtcgagccagaccttcacgtcgatctgcgtctctttggtgttgcgttcaacgtgggaatagcggtcgcgtcgggtgagctgctcgccaatcatcgcccagtttagcgtgtcgcggttatagcgcaggcccgcaatgcccatgttgtccgccagcgtgatatccgtgacgcgatcgccgatcacatagctgttgcctttatccagcgcctcttccgccagataacgttcaacaagcttcacttttggcttgcggcagtcgcactcgtcggcaggcatatgcgggcagatcagcacttcgtcgaaggcgatgccctgcgaggtcagcacctgcatcatcaggttgtgcgggccgtcaaagtctacctgcgggaagctgtcggtgcccagaccgtcctggttggtgatcatcaccagcttatagcctgctttctgaagcttcagcagcaccgggatcacatcgggttcaaaggccagcttgtcgaaacgatcgacctgaaaatcgctgggtggctccgagatgatggtgccgtcacgatcgataaagagatacttctgactcatactttctccgctttcagggcgtcaatcacgcgctggctctctgcacgggtgccgacggtaatacgcaggcagccgctcagggtaggttgtttattctggtctcgtaagataatgccctgatcccacaacgatttaaatatcgcgcttgaggcggtgaagcgcaccaggatgtagttggtttccgagtcgaacacctgctccacgcacggaatcgttttaagggcatcgacaagatactgacgctcttccaggatctgcgccacacgctcgcgcatcgcgctgatgccctgcggggccagcgcctgtgccgcaatatcggcaaccggcgttgagagcggatacggggcgatcactttcagcagcaggtcgataaccgctttattcgccagcgtaaatccacagcgaaggccggcgagggcgaaggctttggaaagggtacgcagcacaacgagatgcggatactcctcaagccagcctgtcagcgtcgcctgcgggcagaactcaatataggcttcgtcggccacgaccagcgccttgccgcgcgtcatctccagcagggtgcggatatcctgcggatgaataatctgcccggtggggttgttcgggctacagacaaacaccaccttcacgccgtcgaggttatcggcgatgccctgcaaatccagctgccagttgtcgagcgcctgcacgttgcggcaggacacgccaaaggtttcggcgctgacgctgtacatcccgtaggtaggctggcagtacatcaccgcgtctttacccggctcacagaaggcgcggatcagcagctcaatcccttcatcagccccacggctgaccagcacctgctcaggcttcacgcctgcatactgcgcatagttctcgatcaccgctttcggctgacactccgggtagcggttcagcgtctgctgcgagagctcaaaggccaccgccgtgggatattcattggcattcagccagacgtcgccgttgccgcccagacgacgcgcagactgatagggcgtcaggcgacggacattttcgcgggctaattcttcgatgttcatgcttgctccttcagggcggcaacgcgcagcgtcacggcatttttgtgggcagtcaggcgctcggcggcggccagggtttcaatggtcgacgccagcgaggcaaatccctcgcgggagagttcctgcacggtcatgcgcttctggaaatccgccagccccaggctggagcaggttgaggtatagccatacgtcggcagcacgtggttggtgccggaggcgtaatccccggcggattcgggtgaccagtccccgaggaacactgagcctgcgctggttatgctgtcgaccagatcgcgcgcgttgcgggtctgaataatcaggtgctcaggaccgtactggttggagatggcgatgcactggtcaagatcgcgggccacaatcaggcggctggcggatagcgcctgacgcgccgtttccgcacgcggcaggtcagccagctgacgctcaacggcgtcgcccacgcgttttgccatgtcggcatctggcgtcagtaaaatcacctgcgagtcagggccgtgctcggcctgcgagagcaggtcagaggccacgaaatccggtgtagcgccgctgtcggcaatcaccagcacttcagacggaccggcaggcatatcaatcgccgcgccgtccagacgctggctgacctggcgcttcgcctcggtcacgtaggcattgcccgggccaaagattttgtcgaccttaggaatggatactgttccgaacgccagggcagaaatcgcctgcgcaccgcccactttatagatcgcctgcacgccgcacagcttcgccgcgtacaggatctcatcggcgatcggtggcggagagcagagcaccaccttctgacaaccggcaatacgtgccggggtggccagcatcaggacggtcgaaaacagcggggcagagccgccgggaatatagaggccgacggacgccaccgggcgtgtcacctgctggcagcgtacgccgggcagggtttccacatccaccgcctgcaatttctgcgcggtgtggaaggtatcaatatttttcaccgcgacggccatcgcctgtttgatgtcatcacccagacgattgctggcatcaatgatttcctgcccggtaacctgtaaagcgccgacttccgtcttgtcaaacttcgcgctgtagtcgcgcagcgcgtcgtccccgcgggctttgacgttatcgaggatctccgtcacggtgcgggtgatgctctccgaggcggaaattgccgggcgcatcagcagctcgcgctgttgcgcgtcgctacaggtattccagtcgatgattgtgttaaagctcatggtcgttactccatcatcttctcaattggcagcaccagaatggagcttgcgcccagcgccttcagtttttccatcgtttcccagaacagggtttcgctgctgaccatgtgcatcgccacgcgctgctggtcgcccgccagcggcagaatggttgggcgctcagcgcctggcagcagggcaatcacttcgtccaggcgctcggttggcgcatgcatcatgatgtatttggattcgcgggcctgaatcacgccctgaatgcgggtcagcaacttgtcgatgagctgctgtttggcgtcggccatctcgccgtcgcgctggataaggcacgctttggagcggtagatcacctccacttcgcgcaggccgttcgcttccagcgtggcgccggtggagacgaggtcacagatggcatcggccaggcccgcacgcggcgccacttcaacggagccattcagcagacaagatttaaactgcacgcctttttgatcgaggtaacgcttcagcaggtgagggtaagaggtggcgatacgtttgccgttcagcgcggccgggccgtcccaggcttcatccaccggcgtggccagcgacaggcggcagccgccgaagtccagacgacgcagggtaaagtagcgcggatcttcgccctgcgcgcggcgggttaataactcttcttccagtacgttttcgccaatgatgccgaggtcaacgacgccatccatcaccaggcccgggatatcgtcatcacgtacgcgcagaatgtcgatcggcatattttcagccagggcgatcagacgctgggtgtgcaggttgattttaatcccgcagcgggccagcagttcgcgtgaatcgtcgcttaaacgccctgatttttgaatagctatgcgtaaacgtgagttatctaacattctgtgttcctcgttaacctgttttaacctgtctgaatgcggtccaaaaaaaagcccccggaagaagatcttccgggggctttttcatgcgttcatgcaccactggaagatccaaacgtcttccagcacacatcgcctgaaagactagtcaggatgatggtgatgatggtggtttttaaaaggaacgcgtgtcatataaattctcgttgaatgcttatgcatttgatgtcttttaacctaaaccagttgtacgccataaagcaagggctttttttgatcattaattcatttcatattgatggtatgaattgtgcgttccaccaggctggcgtagccttataacaggcatcgttaagcggagaatgtaatgaaaaaggtcgcgattatcgggttaggatggttaggaatgccactggcgatgtcattagccgcgaaaggctggcaggtgacagggagtaagaccacccgagatggggttgaagcggcacgcatgtgcggcattgatggtgtcgagctgcgtctcgaacccgagcttatctgcgataccgacgagctggatgaactgatgaatgtggacgcgctggtcattaccttaccggcgcggcgcagcggcccgggtgagtctttttacttgcaggcggtgcaggagattgtcgacagcgccctggcgcaccatatcccgcgtatcattttcaccagctccacctccgtctatggcgatatcgacggtacggcgaaagaaaacaccgagcgccgtccggtgaccgccagcggccgggtactgaaagagctggaagactggctgcacaatctgcctggcacgcaggtggatatcttacgcctggccggactggtggggccggggcgtcatccggggcgcttctttgccggtaaatccgcgccggatggccagcacggggttaatcttgtgcatcttgaggatgttatcggcgcaatagaactgcttttgcaggctccgaaaggggggcacatctataatatatgtgcgccttcgcatccgccgcgcagtaccttttatccgctgatggcgcgccagctgggtctggcgccgccggtattcagcgaggcgcagggggaacgcaaaggcaaaattattgatggcaatcgtatttgccatgaactgggatttgaatatcagtatcccgatccgctggttatgcccatggaataattgcgccggcggagacaatcgcacaccgcaagggggcgaagatgaaaccgctgctggatgttcttgttattctggatgcgctggaaaaagaggggagctttgccgccgcctcggcgaagctctataaaaccccttcggctctgagctacaccgtgcaaaagctcgagagcgatcttaatatccaaatccttgaccgcaccgggcatcgcgcgcgtttcacccgtacagggcagatgctgctggaaaaagggcgtgacgtgctgcatacggttcgcgagctggaaaagcaggccgtcaaacttcaccagggctgggaaaatgagctggtgattggggttgatgatacattccctttctccctgcttaccccgcttattgaggcgttctatcagcgccacagcgtcacccggctggtttttatcaatggcgtgctgggcggttcctgggaggccctgacgcagggcagggcggatatcatcgttggggcgctgcatgagcctccccagttgagcgaatttggttttgcgcggctcggtgttctggagcaggtttttgccgttgcgcctcatcacccgctggcgaatgaaccggagcctgttacccgacgcgtcattaaaaactatcgcgccattgtggttggagacagttctcgccccgaatgcggcatttcatcgcagctgctggatgagcaggaggccatcaccgtttttgattttaaaaccaagctggagctgcaaataagcggcctggggtgcggttaccttccccgttatttagcgcagcggtttattgacagcggagcgctggtggaaaaacaggttttagcgcagagcagtaacgaatcggtatgggtgggctggaatgaacagaccgccgggcttgccagcgcctggtggcgagacgaaattttagcaaatagtgctatcgccacagtttacgctcaggcagatgatgggaaatcaatcagttagtaaaattaatttatgggcaggtttctcaatgtattgccttttgtatctggaatagggcaaaatgccgccgctgcaaacaaatgaataatcgacgatataaaaggcgtcggttatttttttttgcatgtacgaaacgaaactaaaaaccaagaggccgggcttcgtaccggatagatatttactaaaatccgacagttgttgtcgctgaggaagaaagaaatggggcaatttttcgcttacgtggcggttatcaccgtaaaggagaataactatgtcgcataacgcaactccaaacacctctcgcgtggaattacgtaaaacgcttacgttgattccggttgttatgatgggccttgcctatatgcaaccgatgacgctgttcgatacattcggtatcgtatcaggccttactgacggtcacgttgcaacggcgtacgcctttgcgctggtcgccatcctctttacagcgctgagctacggtaaactggttcgccgtttcccgtccgcaggctctgcgtacacctatgctcagaaatccattagcccggcggttggctttatggtgggctggtcatcactgctggactacctgttcatgccgatgatcaacattctgctggcaaaaatttacttcgaagcgctggtgccttccgtgccgtcgtggatcttcgttgtggcgctggtggcctttatgaccatctctaacctgcgcagtatcaagaccgtggctaacttcaacaccctgattgtgatccttcagatggggattgttgcggttatcgttgggctgatcatctacggcgtttcccacggtgaaggcgcaggtacgctgaccagcacccgtccgttctggtctgaaggcgctcacgtagtgccgatgatcaccggtgcgactatcctgtgcttctcgttcctgggcttcgacggtatctcttctctgtctgaagagaccaaagacgctgagcgcgtgatcccgaaagcgattttcctgaccgcgctgattggcggcctgatcttcatcggtgcgtcttacttcttacagctgtacttcccggatatctctcgctttaaagatccggatgcatcacagcctgaaattatgctgtacgtggcgggtaaaaccttccagtggggcgtgctgatcttctccagcgtcaccgtactggcttccggtatggctgcgcacgcgggcgtttctcgtctgatgtacgtgatgggccgtgacggtgtgttcccaacccgcttcttcggttacgtgcatcctaaatggcgtaccccggcgtggaacgtgctgctggtgggcgctattgccctgctggcgattaaattcgacctggtaacggccacggcgctgattaactttggtgcgctggtggcgttcaccttcgttaacctctccgtgatttcgcagttctggatccgtgagaagcgcaacaagacgctgaaggaccacatcaactatctggtgctgccagtgtgtggtgccctgacggtgggcgccctgtggatcaacctggaagagagctcaatggttctgggtctgatctggggtgcaatcggtctgatttacctggcttgcgtgaccagaagcttccgcaacccggttcctcagtacgaagacgtcgcgtaagactgtgtcgggtgacggctatgctcaacccgacctacagtttcgtaggccgggtaagcgttagcgccacccggcaaaaaaaagccggagacatcgcctccggcttttttgtacccgctactcagacaatttcttgcgcatactggaacagcgctttcagcagcgcctgcttttcagcattcccttcatactgaccgtaaagcatctccagctcctgggcgtagctattaagaaactccggcgtaaacacgttgcgccgatgctgtaaccagcgttcctgctctgcttcatccagcgtgccgggatagttgcgcgcgcgataattaaacatcaacttctcaatgcgcttatctgcgaaggtgatatccagcgcgggcaggttacgcgggtcggtttgcagcacgatgttcatcgccgcgcgatcggcatcgctgaagaagccgttataaagctgcgcatccacattctcagacggcacgaacggctctgcttcggcaaaaatggcgacaactttctcgcgcacctgcgggttgtcgcgcagcactttcaggttgtcgaggcagtgctgacggttaatccccagccggtcggcgtcttccgggcgcagcgtgttggcctgcgccagcaccgggcacttattaatgtgcaccagttttaccggtacggctggcaggtcacccagcgcctctttcggggtatagagccgttcacgtaaggtgtcgctgtcgagctcaagcagcggggagatatctccggcgagatccaccatgatgacggcgttacggttgtccggatgccaggcaagcggcgccacccagcttgtattcccgcgccacgcaccgaacatccctgaaatatgcaccagcggtttcatctgcggcacgtcaattagcgtcatcagcttttgcttgctgcgatggctcaacagatactcaaacaggcgcggctgcgcggtttttacaagtttcgccatagcgatggtcgcgtaaacgtctgccatcgcgtcgtgggcgttgctgtgctcaatgccgttggcccgcgtcaggtgctcgagcctgaagctcggcaagccgtcgtcgttctccggccagttaatcccctccgggcgcagcgcatagcaggcgcgcatgatatccagcaaatcccagcgtgaattacggttctgccagctccaggcatacggatcgtagaagttgcggtagaagatattgcgcgtcacttcatcgtcaaaacggatattgttgtaacccaccacgcaggtattgggcaccgtgaacaggtcgtggatgcgacgggcaaattctgcttcgctaacgcctttatcccgcgcttcctgaggcgtgatgcccgtcaccattaccgcgcccggctgcggcagatagtcatcggcgggcttacagtaaaacacctcgggttcgccgatgacgttaaattcgtcatcggtacggatagccgcaaactgcgccggtcggtccagcgccggatgggtgccaaaggtttcgtaatcgtggaacaaaaaagtcgggcgcgcggcagagtcagacaccagtaatctcatcctgttaaaaattgacgtctctatggtaaacgattggggtgagcagtccgaataaaaagcaccgtcaggcaagaaatttgcgagatttgttccgaaaaaatctgcgtgctgtcactatttttttgcaattaaggcaggtaacgacatcagaactcccgtaaaaaggtcatcgatttttactgacctgaggatataccgttgaaacgccgtctgtttattgctgtttctttactcgcttcgagtatttcttccgcgctggctgccgagccgctggatttttcacctcagccgcctgccatccaggctggctcctgggtattgatggattacaccacgggtcaaatcttaacggcgggcaacgaacatcagcagcgtaatccggcgagcctgaccaaactgatgacggggtacgttgtcgatcgtgccattgatagccaccgcatcagccccgatgacattgtgacggtcggacgtgacgcatgggcaaaaggcaatccggtctttgacggttcgtcgctgatgtttctgaaggagggcgatcgggtttccgtgcgcgatctcagccgcggcctgattgttgattccggcaatgacgcctgcgtggcgctggcggatcacgtggcgggcggtcagccgcagttcgtcaggatgatgaatgactacgttgaaaagctgaacctgcgcgatacccacttcgaaaccgtacacgggctggatgcaccgggtcagcacagctccgcttacgatctcgccgtgctttcccgggccatcattcacggcgagcctgagttctatcacatgtacagcgaaaagagcctgacctggaacggcatcacccagcagaaccgcaacggcctgctgtgggataagaccatgaacgtggatggcctgaaaacgggtcacacctcgggcgcgggctttaacctgattgcctccgcggtggacggtcagcgtcgactgattgcggtggtgatgggggcagacagcccgaaaggacgtgaagatcaggcgcgcaagctgctgcactggggacagcaaaattttgatacggtgcagatcctgcataacggtaaaaaagtgggaaccgagcgcatctggtacggcgataaagagcagatcgcgctgggcacggatcaggacttctggctggcattacccaaatcggaagtgccaaacatcaaggcgaaatacgtgatggataaaaaagagctggaagcgccgatcgccgcgcatcagcgggtaggggagatccagctgtacgatcgtgacaaggtggtagcgcactggccattggttacgctggaaagcgttgaaaagggcggccttttctcccgcctcggcgattatctgcatcataaactctgacctttttgggcagactggcagtgttgcgagtctgctcacataataaacactcctggtttgccgataatctcgattctgctttacagtgtatatatatacagtaataaacggaggcagcatggactacagcatcaggcagcaacagaaacgtacgatcgctggctttcatctcgtggggccgtgggaaaagacggtcaagcagggattcgaacagctggtcatgtgggtagacgggcgtcatattcagccgcaggagtgggtggccgtttattatgacaatccggatgacgtgccggcagaaaagctccgctgcgttaccgccgtaacggtagcggacgatttcactattcctgaaaacagcgaagggataatgatgaccgaaattgctgccggagagtatgctattgccgccgcgcgcgtcgaaaatcatgatttcgccactccatggtatcagttcttcaactccctgctggaagacaacaaattccagatcgcggcaaaaccctgcttcgaacgctatctgaacgatggcaatgctgacggctactgggatattgagatgtttgtaccggtagagcacaaagtgggataatcctgcggaatgcagggtttttcagccgggcgcgatccacccggctgaaaacacagtacaattgtggtttgccgtagagctggagacgggtgtgcgccccgacaagtcattaaccccttttgaaattcggttatacaaacattatcgcgtggtgcacggttgccgcattgcgctggcgtttgtgttgaccttcgtactggttcgtctgctggatatcccggaagggacgtggccgctgatcacgctggtggtnnnnnnnnnnnnnnnnnnnnnnnnnnnnnnnnnnnnnnnnnnnnnnnnnnnnnnnnnnnnnnnnnnnnnnnnnnnnnnnnnnnnnnnnnnnnnnnnnnnnnnnnnnnnnnnnnnnnnnnnnnnnnnnnnnnnnnnnnnnnnnnnnnnnnnnnnnnnnnnnnnnnnnnnnnnnnnnnnnnnnnnnnnnnnnnnnnnnnnnnnnnnnnnnnnnnnnnnnnnnnnnnnnnnnnnnnnnnnnnnnnnnnnnnnnnnnnnnnnnnnnnnnnnnnnnnnnnnnnnnnnnnnnnnnnnnnnnnnnnnnnnnnnnnnnnnnnnnnnnnnnnnnnnnnnnnnnnnnnnnnnnnnnnnnnnnnnnnnnnnnnnnnnnnnnnnnnnnnnnnnnnnnnnnnnnnnnnnnnnnnnnnnnnnnnnnnnnnnnnnnnnnnnnnnnnnnnnnnnnnnnnnnnnnnnnnnnnnnnnnnnnnnnnnnnnnnnnnnnnnnnnnnnnnnnnnnnnnnnnnnnnnnnnnnnnnnnnnnnnnnnnnnnnnnnnnnnnnnnnnnnnnnnnnnnnnnnnnnnnnnnnnnnnnnnnnnnnnnnnnnnnnnnnnnnnnnnnnnnnnnnnnnnnnnnnnnnnnnnnnnnnnnnnnnnnnnnnnnnnnnnnnnnnnnnnnnnnnnnnnnnnnnnnnnnnnnnnnnnnnnnnnnnnnnnnnnnnnnnnnnnnnnnnnnnnnnnnnnnnnnnnnnnnnnnnnnnnnnnnnnnnnnnnnnnnnnnnnnnnnnnnnnnnnnnnnnnnnnnnnnnnnnnnnnnnnnnnnnnnnnnnnnnnnnnnnnnnnnnnnnnnnnnnnnnnnnnnnnnnnnnnnnnnnnnnnnnnnnnnnnnnnnnnnnnnnnnnnnnnnnnnnnnnnnnnnnnnnnnnnnnnnnnnnnnnnnnnnnnnnnnnnnnnnnnnnnnnnnnnnnnnnnnnnnnnnnnnnnnnnnnnnnnnnnnnnnnnnnnnnnnnnnnnnnnnnnnnnnnnnnnnnnnnnnnnnnnnnnnnnnnnnnnnnnnnnnnnnnnnnnnnnnnnnnnnnnnnnnnnnnnnnnnnnnnnnnnnnnnnnnnnnnnnnnnnnnnnnnnnnnnnnnnnnnnnnnnnnnnnnnnnnnnnnnnnnnnnnnnnnnnnnnnnnnnnnnnnnnnnnnnnnnnnnnnnnnnnnnnnnnnnnnnnnnnnnnnnnnnnnnnnnnnnnnnnnnnnnnnnnnnnnnnnnnnnnnnnnnnnnnnnnnnnnnnnnnnnnnnnnnnnnnnnnnnnnnnnnnnnnnnnnnnnnnnnnnnnnnnnnnnnnnnnnnnnnnnnnnnnnnnnnnnnnnnnnnnnnnnnnnnnnnnnnnnnnatccattattacggcaaagaaattatcgacattgtcgcgggagaagcgaccagcgaggtgaaggatctggctctcacctacctggaaatgacggtgctgagttatccggcggctgccatcgcgctgattggtagcggtgcgcttcgtggagcaggaaataccaaaattccgctgctgatcaacggcggcatgaacatcctgaatatcattatcagcagcgttttgatttacggcgtcttttcctgggaggggctgggctttgtcggcgcgggtttggggctaaccatttcccgctatattggtgcggcggcgataattggcgtactgatggcgggaattacgccatcgctgcgcctgacgctgaaaagctatttccgtccgcttaacttcgccattatctgggaagtgatggggatcgggattccggccagcatcgaatccgtgttgtttaacggtgggaaactgctgacgcagatgtttgttgccgggatgggaacggacgtcatcgccggcaactttattgccttctccatcgcctcactcattaacctgccgggaaacgcgctggggtcggcgtcgacgatcatcaccggcagacgcctcggaaaggggcagatagggcaggcggaacggcaacttcggcacgtcttctggctttcaactattggactgacggcgattgcgtggggaactgcgccttttgccgggctgatggcctcgttctatacgcatgaaaatgacgtgaaagaggtcgtgaaggtgctcatttggctcaacgcggcgtttatgccaatttgggccgcgtcctgggtacttcctgccgggctgaaaggggcgcgcgatgcccggtttgcgatgtgggtctccatgctcggcatgtggggctgtcgcgttgtggcgggctacacgctgggggtaatgttgggtatgggcgttgtcggcgtctggctggggatgttccttgactgggccgtgcgcggggcgctgttctactggcgcatggtgagcgggcgctggctgtggaaatatccgcgaaaaaaaccggagcaggaggtttcggaaacggcaagtgcctgacaaatgtgcgaagtggagaataaatcggcaaacgattgaaaatctgcattcaccctttgacatcctcagggcgcatcgataatatgcgccccgttcacacgattcctctgtagttcagtcggtagaacggcggactgttaatccgtatgtcactggttcgagtccagtcagaggagccaaatttaaaaagcctgcttttaaagcaggctttttgcttttctgcgttcggtcagtttgtcgggtggcgctccgcttacccgacctacggaatcccaggccgggtgagtgggtccttgttatcagcggaacggtggctcattgaaggtgcgcagcttgcgggaatgcagtttgtcgccctctgcacgcagtaaatcgatggcgcgaataccaatctgaagatgctctgagatcgccccttcgtaaaaacggttcgcctggcccggcagtttgatctcgccgtgcagcggtttatcggacacgcacagcagcgtgccgtaagggacgcggaagcgatagccctgcgcggcaatggtggcgctttccatatcgattgcgaccgcacggctgagattgaaacgcagggcggaggcggaatagcgcagctcccagttacgatcgtcggtggtgacgaccgtaccggtacgcaggcgctgcttcacctcttcacccggcatgccgctcacctctttggtggcgtcgtacagggcgcgctgcacttccgcgatactcgggataggaatatccggcggcagaaccgcgtcaaggacatggtcgtcacgcaaataagcgtgggcgaggacgtaatcgccaatcagctgactttcacgcaggccgccgcagtggccgatcatcagccagacgtccgggcgcagtaccgccagatggtcgcagatggttttcgcattcgacgggccaacgccgatgttaatcagcgtaatgccctgaccgtcggcggtgatcaggtgccaggctggcatctggtgctttttccacgccaggtcagagatggcctcttccggtgcttcggtttcggcggtgatccatattccgcccgcgcaggagagggcgatgtaagggctgtccggatcgaggatctggctacagccccagcggacaaattcgtccacatagcgggtgtaattggtaaacaacacgaacggctggaaatgttcggctggggtgccggtgtagtggcgcaggcgtgccagcgagaaatcgacacggcgggcatcaaagtgcgacagcggtgaaaactctgccgggtgatagatcccgtccgccgtctcatcaccaatctgcgacagctcagtggtcgggaagtggcgggtcagccccgcgctcatggagcgatccagcgtcagcgctgaaccgtctatcacgtacgggtaagggatctcgtgcagggacggttcaacgctgatatgcgcgccgtaatcctgatacagcagggtaagctgctcttccaggtaggggcggaacagcgcaggtcgcgtgatggtcgtgctgtaacagccggagtgggtgaaacgcgcataggcgcgggttttcggattgctgctggcgctgccgtcccaggtgacagagagcgatggataaacaaaaaggccctgagttctggccttttcatcgggaagcttccctgtttcgatatagtcactgatggcgctgcgcagtgcattgacggactgttcatacagcgcgtcgagtttttccagcgcctgagccggggtcaggctggagcccttattattcatgtctgtctccttgttccacaggtgtgcggctttacccgatagtatgtcacacgcctgtgaaacaaaagtgaggagatcagctgtgcacggtttccttcatcaacagggcggtggcggcagaaagcaggcaacccgccagcagataaatcgccacgctatgccagttaccgcccgagaacgtcaccagcgcggcggcgataaacggcgtaaacccaccgccgaccacgctcgccacctgatatcccacgcccgcgccgctgtagcggtagcttgcgccaaacagctcggtaaacattggctgctgcacgcagaccaccatatcgtgagcgatgttcgcaagcatgatcgcgaagaagacaatccagaagaccgactgtgcctccagcgccataaagaacggccaggcgctgagtgtgccgatgagcgccccggtgatatacacccgtcgacggccaaagcgatccgccagccaggcgaagcaggggatggtcaggcagctgatcccgcccaccaccaggccaatattcaggaacaattcccgcggcaggccgaggttttgcgtggaatagttcagggcaaaggcggtgacgatatacatcgtcagcagttcgcacaggcgcagggcgatgattttcagaaaagcgccagggtgctgcaccagcgcttccatcaccggcagccgttttttcgcgaccggtttttcgcgctgctgccgttcaaactcagccgactcttccatgccgttacggatccacagggccaccacgaccagcacaatgctgaagataaacggaatacgccagccccagctcaggaactgctcgtctgtcgtgagctggcttattagcgacaccaggcccgtggagagcagcagacccacgccataacccacctgcacgccgctgctgtaaaacgctttcttattcttcggcgcgctttccacggacagcaatgccgcgccgccccattcaccgccgacggcaaagccctgaatggcgcgcagcgtcaccagcaacaccggagcccaccagccaatcgaggcaaaggagggcaaaataccgatcagcgcggtggcaatgcccatcatccagacggtgagcatcagcatacgtttccggccaaggcggtcaccgaagtggccgaaaattaccccacccagcggacgaaacagaaaaccgacgccgaaggtggcaaacgcagcaagcgtgcccatggcggggctgatctggggaaagaattcacggttaaagaccagcgcagcggtaataccgtagagcagaaagtcataccagtcgacgacggcgcctgcgaagctacctaaagcggcgcggcgggcgcggttaagcgaaggtgtctcctcgttgcggcgagcggagataagggtggagtccatagttgtcctgtctgtactgatttttaattattggtataagaaaaggtcactcacatcacggccgtcatattgacggaatgtatgagactaccgcgacaggcggcctgagaaaacgtttttatctttcctgaaagcgcagaataaataaatttcatcttatcgggcgacaacataaatcagcctgtttggctccggttagggctgaatggtttacagtaataacgatcgctgcgtgacgtaagctgagggtataacgatgcaacgcctctttcctgcactgtgggtagtcctgtttttagtcgtatctccgctgcatgcggagccgaaagtctatggcgaacagcgtattcaccgctggtgggatgcagtaacggacgatattgcgcaaacctgggaacagccggatcgttacgatctctaccttccgtttctgagctggcatgctcgattcatgtatgacaaagagaaaaccgacaattacaacgaaatgccgtggggcggggggctgggcgtgtcccgctacaacgacgagggcaactggagcgcgctctttgccatgatgttcaaagattcacataacgaatggcagcctgcgatgggctacggctgggagaaaggctggtatctggataacgcaaaagatttccgtctggggctgggggccgctgcggggatcacggcacgcgacgactttgccaactatgtcccgctgccgtttatcttcccgcttttctctgccggatataagcgcgtcaccgtccagttcacctatattcccgggacctacaacaacggcaacgtgctgtttgcctggctgcgcctgggcttttagagggtgatcacttttttggccactgcgttggacaggatcagcagcgaaaacaggaccgacgtaacaaacgtaagcacaatcagagcaagtttggtgctcagggacgtcaccggaatgagcgcggtcagcaggtgaaacaccgagtagtgcataatatagaccccggtcatggttttgctaatggcggccagcacggactctttaaactccgcattgcggcgaaaccgcacgccgttggccgcaatcaccagggcaataatcagaatgtagatttgcgatccggtaagaataaaggcgtttctgtctgctttaaatagcgcaaaaaagaagtgccgctcgtaaaaccacgtgaagagataaataaacggtatggcaatcaccgcggccctgaccacatttttgcggccgatccacgccgcgatctgcggatcgcaaaagagctgccccgtcagataaaacagcagccacgtccacaggcgatactgcggcgacaatgaaaggacgtgggcatcaggatagagggctgacagcaaatcgtacccgtatgagaaaagcagcagggtggcaatgaccccgcaaaagagcattcgtcgctgactgagccgctccaccaccgggtgaaacgtgtaaatcacgataaacgcgaacacgaaccagggctggatcagatatccgcgctgatagggctcccacaggtagtaaatcgttacccagaacagaaagacgatcaccaggcttttgatcttatccagctgccagcgcgtgccgtgtcgggattgcccgtccagataccctgcaaccacaaaaaataacggcgtggcgatggtcgaaatgaaggttaaaaaaccgaggatccagtgatagtcataatcgtaatgatcccaggtgttgtagatggtgaaaaaggtcaccgccgtcatacagcccagcgtcttgatgatattcagccctgtcgcattcattgttgttcagctttgtccttacgatggaaacacgcgtaaattacggggagtaccagcagcgtcaggattgtagcaaacccaagcccaaacataatcacaacggccatgctctggaagaacacatccagcagcagaggggcgaggccgagtacggtcgtaaaggcggtgagcaggatgggacgcaggcgcgacgtggcggcgtacacgatagcactgtgctgatcctgctgcgctttctgctgttctatctcttccaccaacacaatgccgttgcggatcagcatcccgctcaggctcaacaggccaatcaacgccataaagccaaaggggatgccggtaattaaaaaccccggcgtcacgccgatcagcgccagcggcacggtcagccagatagcgacggcgtttttcaccgaactgaacattagcaccgtgatcacaaacatcaccagatacccgagcggcagcgtggtaaatagcccctgctgcgcttcgctggagttctccgcgtccccgccccactcaatgctgtagccgtgaggcaggggcagggcatctatttgcggcttcacgcgggcgagaatatcgccggaggtttgctggcttagcgggtcagggtcggtctgcacggtcaacacgcgggagcggtcacggcgcaggatcagcggatcttcccactccagcgcgaagccgctgatgacgttgctcagcggaatatactgctgccgggtctggctccagaccaggacgttattcaggtgattggcgtccagccgctcgctttccggcgggcgcaccaccacgggcaacaggtcgctgccttctctgtacagtcctgcccgactgccggagaaattcatctccagtgcgttatcgacgtcctgcttatccacgccaagctcacgtcccagcgcagtgacgtactgcgggcggagcactttgctgcgattttgccagtcgttcctgacgctgtccgtcgccggatcgcgcgtaaggatgttgtctacctggctggcgatcagacgcagcctgtccggatcggggcctttaatacgtatttcaatggcgctgtcgccggaggggccaaacatcacccgcttcgtgctggcgttaacctgcggatagttccgtgcgatgtactcatccacgtggcgggtcagggcggagatgttacgctggtcgtccattctcaccataatttgcgcatagttgctgtactgccgctgtccgctgtaggtcaaaataaatcgcatacttccctgaccaatcgtcgagaccgtagtttccacgcctggctggccgttaatggttttctcgatatcaccggtcatcttctcggtccagttaatgtcggtaccgtaagggagccagaggtcgacaaagaaaattggcgtactggaggaggggaagaagttctgtcgcaccgagccaaagccccagatggcggcggccagcagtgcggccatcactaccagcgttggcgctttacgccgtaacagcgcgttgagcacaccctgatagatccgatagatgcgtttgtcatagggatccgtttcgtcggcctttggcggtgcagcatctcgtttaaacagccaccacttaatcagcactggcgtaatggtgagggctgagaaccagctcagcatgagcgaaatcagcaggacctgaaacagcgacttacagtattcgccggtggaatcctgtgacagcccgacgggcgcaaaggccaggatggcgatgaccgttgcacccagcagcggcagcgcagaacggcgaataatgtcgctaatggcgttcatcagggacgagccctgctgccgggctaccagtaccccttcgacaataacaatggcattgtcgaccagcatgctgagggcgatgatcagcgcacccagtgaaatgcgctgtagttcaataccccagagatacatgatcagcagcgtgcccagcacgttgagggcgagggaaaaggcgataatgatcccgctgcgtaagcccataaagatcaacaacacgccgatgacaatcgccagcgccatcaggaagttaatgataaatccgttaacggaatgcccgacctccgccgcctgatcgtaaaacaggtcgatatggatacctgccggtttctcggctgacatctgctctagcttcgcctccagggcatgtcccacgtcgatcacgttaacgccggggataaaggagacgcccatggtgacggcttttctgccgttggcatggtagatgctggcaggggacgcatccagcccgcgtgacagggtggcaatatcccgtaagcgggtagccgccccaacgccgggcggggtcacgatgagatcggccagctcgtcaatacttcgaattcaccggtaggatgcagacgaattgactcggtaccggaggggatctctcccgcgctggagaccacgttcagcctgctgagctgggcagaaagctggttcagcgttatcccgcgcgcggccattttgctcagagaaatgtccacgttaatctgctgagtgagggctccgccgatggccactttgcccacgcctggcacgaggaccaactcccggcgcagctgctcggcataccggaccagttccggattgctgaattcatctcctgaaatggcaaagaaaaagccgaacacatcgccaaaatcgtcattcacaaacggagtcactacgccgggtggaaactgtctggcggcatctcccacccgacgacgcagttcatcccagatttgcggcagtgcatttgagtggtagcgcgaggctatattgaccgtgatctgcgacaggccgctggaggagatggagctgacgttatccagataaggtaactgctgaagcgcattttccagcggcagggtgacctcttcctcaacctgctgcgccgacgcgcccggataatgggtgatcaccaccgccgttttgatggtaaacgccggatcttccagtctgccaatgttcaacagggcaataatgccgcctacgcccagcagcaaaatcgtcagccagacgcgaaccgggttgctgataaactgacgagagatatccattacagtccccgttcacgcgtccagatacgtaccggctggttgggacgtagctccccaacgcctgcggccaccacgcgttcaccggccttaagcccaccgacgatgacgaccccctcagcgctgacttgccccacgctgaccttacgatcttcaaggtgcaacgtatcgccttcgcccgtcaccacccagacatgtggctcattgcgcgggcggttatccgggttaaagaccgcttcaaccggcactaccagcgcctcactgcccacaccagccggaaggttggttaaattgatggtgaccgttccgctgacgccgcccacgacgggaaaatcatccgggcggggcatggttaaaatcacctgccaggtcaatgtgttgctgtcgctactgcctgagtgctctttgtacacagcggtaaactcgcgaccgggcagggcgttgatcctcactaccggtttgtactgcgcattgcgaatatcgaaggtgttaaacaggttctctggaaggctgaacaccacgtccagcagatcggtacgggtcaaagtgacgacgggctggccggcggagacgacctgatgatttcgcacatggacgctggccgctgtcccgctaaagggggcgacgagcgtcatctggcttaattcttcgcgcgcaatctgtagcgcggcgtttgctgaatcgcggttggcgcgctggacatccatctcggctttcgacacggcctggcgtcccgccagggtctggaagcggtcgaattgccgctgagccagggtcgccgccgtttgcctgtcgttcaggcgctgccgggcttcacgggcgttgaggctggcgagtcgttgcccctgtttgacaatggcaccctggcgaatgtccagggtctcaatctgcccggctcgtttgaacgcgagatccgtggcgtcgccggattcaatacgggcgggaaacacgcgctgctgcgcgttgccggccttgaccacctctgcgacttttaccattttcggcaggggcgcggcgcggtcgggtttcggatcgcacgccgtcagcagcattaaaacagcaggcagaagagagaggtagcgcttcacagtattcccctgataataattgttttaattatttcgtcatcaatgctggggtggcgctattctgccagggccgagacgaccacataggtaaataaaccgattgctgtgctggcgataatggcgagcgcaataaacaaaccaaggcgaatcaggcttaaaccgtacatgcattcctccatgaggttgaaggtggcgcgggataaagagaataaacgtgttgcatgcctgactatgagcatagtcggtgaataaataaatgttaaataaccattattagtggcgtgacatactcaggcgaaacaagcgttacgatggtgtatcccctttgaataacatcctgatattcctgtgctacgtttaatagcatccattccttttttccgtaaaaggcattcacgcctgtacccatgggtttgatgcgatctctcctgattcactcactgttgtgttggttataaaaaaggatgcttgatatgtttaaaacgattctggtgccggtggatgtatacgaaacagcgttgtctgataaagcgctacagcatgcccaattcctggcgcaaagcgcatcgggtaatgtccatctgctgtacgttatgccaaagttctcggcggaactgacccgcggttttattgcagacgcgagaaagatggatgaatatatgattaataatgctaaagaaaaactggctgcgctggtaaaaaaaatcaacctgccggaagcaaatgtccatctacatgttcgcagcgggaatatacgtgatgaggtaatcaaactggcggatgagcttaacgtcggtgcgattattgtgggatcgcgtaatccaaatattcaaactcatttattaggatcagaggcggcgagtatcgttcgttacgcgcatgttcctgttttcgttattcgttaatgtcatgaaagcaaggtgatttctgaaaagaacccgaggaaggaacgatgataacagaaaagcctcaccgtccgtattatcaacaaaccgttgatgaaaccctgacaaatatccaatccagcctcgacggacttagcagtacagaagccaccgccaggctggaaaaatacggtgaaaatgccttaccgcaaaaaccgggtaaacctggctggctgcgctttctggcccatttcaacgatgtccttatttacgtccttctggcggcggcgctgctgaagctgataatgggacactgggtggatatgtttgtcattcttggggtagccattattaacgccctgattggccatattcaggagagcaatgcggagaaatcgctgcaaagtattcgcaatatgctctccagcgaggctgtggtcatccggcagggcaaccatgaaactatcccgacgacagcgctggtgcccggagatatcgtcgtgatacgcgccggggatcgcattcctgccgatcttcgcgtgacagaggcgcacaatctgcgggtggaagaagctattctcaccggcgaatccacggtagtggagaaaagcagcgatgcgctccacggggagttgccgttaggcgaccgttacaacctgctttattctggcaccaccgtcagctccggcgggggaaaagggctggtggtggcgaccggtggggagaccgaactcggccatatcaaccagatgatgtcagacattgaaaaacaccgtaccccgttgatggtgcaaatggacaagctcggcaagaccatttttatcaccattctggtgatgatgctggcgctgttcgttttcagtcttatcttccgtgatatgcccgtatcagagttggtgctgtcgctgattagccttgcggtggcggcggtgccggaaggattaccggccattatctcgatcatcctctcgctgggcgtgcaggcgatggcgcgtcgcaaggcgattattcgcaagctgcctaccgtggaaacgctgggggcgatgacggttatctgctcggataaaaccggcacgctgactatgaatgagatgacggtaaaagcggtgattaccgcggacaccacctaccgcgtggagggagacagctacgagccggtgggtactattcaccccgttgacgatccgacaccggtcaccgtgaccccgggatctgtgcttgagcgctatctgcgcacagtcgatctctgtaatgacagccagctgatcaaagatgagcaggggctgtggaaaatcaccggcggtccaaccgaaggcgcgctgaaggtgctggcggccaaaatcccgcttccggcaattgacgccgagttgcgcagtaaaatcccatttgattcgcaatataaatacatgtccaccctctatcgcctgggcgacgaagaggtgatgttaatcaccggtgcgccggacgtccttttccgtctttgccagcaccagcagacccaaaacgggctggagccgttcaacctgcactattgggaagagaagattgaagagtatgcgcgcgagggattgcgcatggtggctgcggcctggaaaccggctgccagcgggcagcgcgagctgacgcatgcggatctgcaagaaggggtcatactgctcggcattgcgggcatgatggatcccccgcgcccggaagccatttcggccattgccgactgcttgcaggcgggcattcgcgtgaaaatgattaccggggatcatccacaaacggcgatgagcattggacagatgctgggtattggcaacgcggcgagcgccatcaccgggcgcgagctggaggcgatggacgatcaccagctgagcgaggcggcgcaaaaatacgatatctttgcccgcaccagcccggaagataaattccgcctggtgcaggcgctgcaaagtaagcaggaagtggtcggaatgaccggggacggggtgaacgatgcgccggcgctgaagcgggcggatgtcggcatcgcgatggggatcaaaggtactgaagtcaccaaagaagccgccgatatggtgttaacggatgataactttgccaccattgcccgggcggtccatgaagggcgtcgggtctacgacaacctgaaaaagaccattttgttcgttatcccgagcaacatcgcccaggccttactgatcattattgccctgctggcggggaacctgatcccattaacaccggtactgatcctgtggatgaacatggcaacctcggcaacgctgtcgtttggcctggcgtttgaagcgggtgagaaggacatcatgaaccggccgccgcgtaagtctaacctgcatgtgatggacggttatgccatctggcgagtagtgtttgtcggcctgatgattgccatcagcgcctttgtgctggaggcctggctgcaaccacgcggctactcaccggagtttatccgcaccgtgttgctgcaaacgctggtcaccgcccagtggttttacatgctcaactgccgcgtcaccgacggcttctccctgagtaaaggtctgctggctaacaaggggatatggatcgtgagcggcgtacttctggcccttcagcttctgatcatctatgcgccgttcatgcaaatgctgttcggtaccgaagcgctaccgttccgctactggatcattaccttcctgattgggtttgcgatgttcatgattgttgaagcagaaaaagtccttacccggagatggcgcacgacgaaaagatgactgaatgagtaggctaagcctgcccactggcaggctttctctttgactgagtacagaacactatgattcgatttgcctcgttcgtttttacgcttggtattctggttcccgctgcatctgctgtaacctaccccctccctcccgagggcagccgtctggtgggggcgccgatcaccatcaccgtgcctgagggcaatactctgccgctcgaagcgtttgcagcgcagcacggacaggggttgagcaatatgctggaagccaacccgggggtggatccgtttttaccgcgagccggaacacagctggtggtaccccagcagcttattctgccgccaacggtgcgcgaggggattgtggtgaacgtcgcggaaatgcgactttactattatccacccggcagcaacacggttgaggtgctgcctattggcatcggtcaggccgggcgcgaaacgccgcgtaactgggtaaccgccgttgagcgcaaacaggaaggcccaacctggtcacccacgccaaatacgcgacgcgcttacgcgaaagaggggaaaacgttgcccgcgttcgttcccgccgggccggataacccgatggggctgtatgccctctatatcggcaggctgtacgcgatccacggtaccaactcaaatttcggcattggtctgcgcgtcagccagggctgcattcgcctgcgtaataacgatatcaaatacctgttcgataacgtttcggtggggacgcgggtacagcttatcgatcagcccttaaaggtgaccaccgagccggacggtagccgttgggtagaggttcacgagccgctgtcacgcaatcgcgcggaatttgaatcgacaaataaggtgccgctgcccatttcagccgcacaaaggacgcagctaataagtgaaggggcgggggctgagctggaacggcggtcggggatgccggtgaagcttgctatgcccggtggcgctgcgcttaccgggcctacaggaccgtaggtcgggtaaggcgaagccgccacccgacaattttacagaacgcagaatgtaggtcgggtaagcgcagcgccacccgacaaactgaccgaacgcagaaaagcaaaaagcctgctttaaaagcaggcttttcaaatttggctcctctgactggactcgaaccagtgacatacggattaacagtccgccgttctaccgactgaactacagaggaatcgtgtgaacggggcgcatattatcgacctgcgtacgccttgtcaaaggatggatcgccgactttgaactgtttgctgacaaaaccagcaaagtgacgtttttgccaacggaatgcaccattattgtgcagatataccccgaatggggcagatcggaaaccgttgtcctcgactcaaaacaggcaccagtgattggctttccttattttcagccgcttagcagcgacatacacccgctgcaaaaaactggcatccatattgcaaaacctgtttaacaacacagccgttaccggcacgctattttcgaacagggggcaacatgaacttaagacgactgaaatacttcgtaaaaatcgtcgatatcggcagcctgacccaggcggctgaagtgctgcatatcgcgcagcctgcgctgagccagcaggtcgcgactctggaaggcgaaatggaccagcaactgttgatccgcaccaagcgcggcgtaacgcctaccgaagcgggaaaaattttatatacccatgcccgcacgatcctgcgtcagtgtgaacaggcgcagctggccgtgcacaatgtgggtcagaccctgagcggccatgtctccattggcctggcgccgggaacggccgcatcgtctgtcaccatgccgctgcttcaggcggtgcgcgcggagctaccggaagtgctggtttatctgcatgagaacagtggttccgtgctcaatgacaaactgctcaacggtcagctggatatggcggtgctgtacgatcgctccccggttgccgggatcaccagccagccgctgctgaaggaagatctttacctggtcggtacccgtgattgtcccggtcagagcattgatttaaccgctgtggcagagatgaacctgttcctgccgcgcgactacagtgccgtgcgtgtgcgcgttgacgaagcgttctcgctgcgccgtctgacggccaaaattatcggcgagattgattccatctccacgctgactgccgccattgccagcggcatgggtgtaacggttctgcccgagtctgccgcacgttcactgtgcagcgcggcgaacggctggatggcccgcatcaccacgccatccatgagcttaccgctgtcgttgaatatgtccgcgcgcggctccctgtcaccgcaggcgcaggcggtgaaagagatcctgatgtctctggtcagtaagccgtcgctggaaaatcgcgagctgcaactcgtcagctgatattccaaataagcataagatgctggtttttattatttgttctccagcccgcctgactctaacaatagccttatgtcagatgcgccggagtgaattgtgaatttccagcaactaaaaattattcgtgaggcggccaggcgggattacaacctgaccgaagtcgccaatatgctttacacctctcagtcgggcgtcagccgacatatccgcgagctggaggaggagttaggcattgagatttttatccgtcgcggcaagcgcctgctgggtatgaccgagccaggcaaggcattgctgaccatcgctgagcgcattctcaacgaggccagcaacgttcgtcggctggcggatctctttaccaacgacgcttccggtgtgctgactatcgccaccacccatacacaggcgcgttacagccttccgacggttatcaaagcatttcgtgagatcttcccggacgtacgtctcgaactgatccagggcacgccgcaggaaattgaagtgctgctgcataacggtggtgccgatatcggtatcgccagtgaacggctgagtaatgacccgctgctggtggcgttcccgtggttccgctggcaccacagcctgctattacccgccgaacacccgctgaaccaggtttcaccgttgacgctggaagagatcgtcaaatggccgcttatcacctaccggcagggcattaccgggcgttcgcgcatagatgaagcgttcaagcgtaaagggctcacgccggacgtggtgctgagcgcgcaggattccgacgtgatcaaaacctacgtcgagttagggctggggattggcctggtggccgagcagtctggcggagaatatgaggctggtaatctggtgcgtctggatacacgtcatctgttcgatgcaaacaccgtctggctcgggctgaagcgcgggcagcttcagcgtaactatgtgtggcgttttatcgagctgtgcaatgcggggctctccgtagatgagatcaaacgccaggtgatggagccggaagaggtggcgattgattatcagatttagtttttgcccggcggagcattgtctgccgggaacggtaagagtggctctaagtctccctgggtgatgcgtgtaccgagttaaataaaataatgccatccataaatgaatggcattattattttattccttaatggctaattccttttagacatatttaaaaagtgtatccggcagttaaatagtaggcccaccccgtagagtctatacgggtaatctgccctttgctattatatgctttactgccttcttcaaattgcccaccatgatagaaataacgaagggtggcgccatagctccagtgagagtaaactaagctgaggatatgggtagaaactattgagtcattagtacgggagtaaaaggattgctcgccacctgattcgtcttttaagtctgagccaaaatcaaaattggtgaaaccgatgtaatttagcttgccgccaaacagtgtagttaaaggaatagcatattttaatttaaagcgatatccatcccattcgttttcgttggcggcgttataattattcccctggtatttagcgtagatgtttgcagataaagtcatcggtaatcccgtatcaatatccgtcccaattcccatataccaggtactttgacgctgtccttcgttagtacccgcatcataaatatagttgtgagcaaaataccattctttaaatggaccaacgctcaaatcaagtcccgttaatttgtcgatgctaaaacgtggctctatttctgtaaagaatggcgagccattgtcccaaataccaatgtcgttgtcatttcccaaaccaaaaaatttaggtaaatccgcatagccgtaaaaatcaaaccaatccacatgtgcccacgcacggtattctggataaagatcggaccttttttgtggcccaaagcgagtagagttgctgccgactatattaatgctttgatgccaccagtctgatagatattcattattaccagagtccgcaaacgcaatcaaggggagcattatcaatgcgcctggtaaaagatatttcatttttttcatgcgtgtatttcctttaatgggagtatgttgaaaagcgagtggtatttaaaatacatgtcagtatttaatcacttcttgtttaattcattttgctgcgcttacatcagtcaccctcatttcatgatcgggtttaactgggctatgcgccttcacataatcaataattgaatcggcagaggtagtgctgttaatagttttaatatttttcccttttaagaatgcttcaaatccatcgccacctgtcgcacaaaatgagtgtgtagcaacccgatatatcctggtcggatctatgggttgattattgacagtgaatttaatgagacgtttgcccagcggttttgtactgtcatagacaacatgaacgctttttgatacttgcaaaataccattggtgagattagtcgcatggatcattaaatcggtgagatcttttccggtaagatccatttcaaccaggtcattattaaacgggaaggtggtaataacatcgccgtaggttaaatttccctgtgggaaatcagcacgtatccctccgctgttttgtaatccaacgacggcatccggcacttttgccatcatggcatcaattatcaaattaccgacgggtgatgattccccatatgaacgcgtaaagtgcgccgttgtcgaaccaataacctggccagtgatttttttcagactggcattccactcatcaattttaagctgaacttttggatcaggtttatattcatcagcaaatacagtgattaattcacctttgtaacgcacaattttcttcgtctgagggttaaaatccaatactaatttaccaatgtcagtaccataggcatccgttgaaacaatgatagtgtcattaactttaatcggttctggcgtccctacatgggcatggcctgtgattaatacatcaatacccttaaatttcttcgcggtatcgatatcagcttgtagcattctggctacgtctttgtttccatagcttgactggcgcgctggcgtaccttcatgaataagcagcacgatgatatccactttaccttttaaggcatcaagccctttttgaatataaggctcttcatcacgcgcctctgaaccagcgtaagccttagctgcaatcgtgtcataaaatgcaaatttctgatgtaccccgattacgccaattttgatgccatctttttcgacaaccgtccaaggggtattccagacgggcttttcactgttggtataaaaaacattacctaacaaaatggggaagtgtgctcttgataactgcttaaccatgttatcaacgccatagtcaaattcgtggtttcccactgacacagcatcaaagggcatggtgttcatgatatcaataatggcttcgcctttggtcagggtacttatatagggcccggtaaagtaatcacctgcatcaaagaaaaaaacatctttacttattttcttagcatcattgacgatggtcgctatattcgcaaaacctcctaccagacgttctttgtcaacggtgggtagtttcccaggagagacatgagcatgtagatcgttggtatagtaaatagttacatcttttgcatgaactgaggcggttaacgttgcgaaccaacataacgtaatcaggctcagctttatatttttcttcataatcaattcccttgaaaaaaataatagcttgaaaagggtccatgtagaggtatgaacccttaaacgtttattttatttcaatgcattcatcaccaatgcggcgccaaaagcctgtatggtaagaacctttactttttcacatcagcaacgcgcatgccgttgagctgctcatccgtaatagtgttgcccgctttgaagtaatcgatcacggcattagaaacgtagtaaccgcctgttgtattacgcgctttaccctcggtaaaggtggtaaaaccatcgccgccgtcagcaaggaagctctgagtggcaatgtggtagactgtcgcatcctcaatcggcttgccattaaggttaaatacgacgacccgctgaccgattggtttactgctgtcatacttcacctccaggccttttgaaacctgcaagacgccattacttaaacttgcggcatgttccatcaacgtgcgtaattgtttacccgtaagatccattgtggccagctcgttagggaaggggaacgtactgatgacgtcacccatcgtaattgcgcccgacgggatctcattgcgaatgccgcccgagttggtcaaggctagctgagtatttttacccgcagccaccagtagagcgtccgcagccagattacccagcggggctgattcaccatacgcgcgcgtcaactcaaccggcgactgcgccaccgtttgttgaactactttatccagtttcttattccagccgtctataacctgtttcgtttgcggatcgggcttccactcatcggcgtaaatggttttaagctcaaaatttttcatcgtaaactgatgcggcttcgtgtagtccagtaccagtttccccacatcaatgccgccgctgtcggtcgagaggatcagcgtattgccaactttaatcggttccggcgtaccgacatgcgcatgtcccgtaatcagaatatccagacctttcacctggcttgcagtttgaatatctttatccagtgcacgtcgtacgtcggtccctcccatactggactgacgcgccggtgtaccttcatggaccagcaatacggtcaggtcgactttgcctttcagttcatccagatagcgctgtaaccacttaatttcatcccgcgcttcaatgcctacgcgcgttgccgcggagacggtatcattgaaggcaaacacgccgtgcaaaccaatgacgccaattttcacgccatctttttcgacgatggtataaggtttatcccagaataatttgctgctgttctcatagaatatgttgccctgtacgacagggaatttcgcctggcttagctgtaataatgtattatcccagccatgatcaaattcatgattacctatcgttacaacatcaaacgacatggtattcataatatcaataattgcttttcccttcgttaagctactaatataagggccagtgaaatagtcacctgcatcaaaaaaccatgtcgctttactttttgatttttcctcttttaccagagtagtgatattcgcccagccaccaatatcccgtttgccgtcagcaatccatggcactttataaggttctacatgagcatggagatcattggtataaaggatggtgacatccttagcgcaggcccaaaatggtagcgtcgtcagaatacccgcagcgattaactttatcttcataagtcgttcctttcagtcatataaagattcgctactttacgttctgaaaggattttttatgcgaacctgctcacacacttatgcaagagttatgcggcaaaatcaccgacccattcaaatcgttggtgattaatattgattctgtttacgattaatacctgtaaatcgtttggttgccgtaatttagggctgccagtctcagcatctgaagattacagttggccagactacaggctgggatatccagcattgcactgccgggcatgtgggagttatccccctctgtttaatgaacaacaatttaatgaatggcttttttcttgcttaagcgcctatgccttagaaaacggttatttttgccctgaatgttattgcccgaaaactatttgttatggttataacccacgggggacacagcgcgttcagtgccgcgcctgcaaaaaagtctggacacccaaacagcaaaagcaaagaaaaatagtgtatccagaacgtattgaaactgtgtcactggttgtaccgttccaggggagaattgcagaacagaaattgtatgtcctgatcagttttgatgccatccgcggtaatattattcatctctctactaattttactgagcatcaaagtggggaaacattacgttatcactggaagggaaatatcgagcctgatttgcatcacgctgatattgtaaaacgcgttgatatgcgagagacacagtttctgcgtcggagccagttcgatgaaatacagtatggaagcgcggctctgaaatgtaacgccagaggttcgattgtgcgcccggtgatagcggctcacgggcattttcgaatactgaatctcctctttcctgaggtaaagatgcatgttatttcacacgaatgctttcttcggggagcagtcattaccgcctgggcaaatttgtttcgcctggggcaaggtgaaatgtggtttatagaagaagaaatcaacgataatgatagtgatataccctggaattttcagagaacgtcacagcatggctggtggcaaagtcagtggcagctttgggagcagggaagaaaccgtaagatggtttgcccattaacgggggggatagcagtagcgctaaaaggctctctttaatggccagcaggtgctttatcaactggctatataaacaaacgcattttagtcgcagcgcgcaactatccgcagggcgggtcacgcaaatactactttccctggcgcaagactataacgataaatttacattagcgccttcaggtatgaataatggctcaatcttttcggcgatgaagtcatgacctgtgcgcttcgtatatagcatcaaggggtcatggctcgacatgaccccctattaacatatgcagtgatcaattgcatctgttccagattgttacatcatttgattaatttgcataaatagatgctgcagtgatgacgtcagtaagctccgtttcattaaataatcttgcacggtaggcctccccagggtattgaggagcgccatcagataaagaaatcacatcatagatagaggcaaccatattaccgtctacgtcactgataaagaatgagcgcgcatggcaggtaaaaatagtgaaataatcaccatgatcaaacacgcctcccataaagtcggtccattggaggataggcgtcgttgggagttcaacaggcgcatgaatctcaacagcggtgcctgctgctaagtcgaccgcatagaacagaatgcgggctggatctgtttgataggggtccgacgtcgctgcgtcatttatcggacgaataacagggttaccattttcatctatgcaagatcggttatcgaacaccgataagacaaattttcctgcggtaggatcgatactggcagaaaaagcactattattcgtaatgcacaccgtatgggcaccattttcaaaatgagtaatacccgaattatcaatatgaatagtcgcttgttttgccgggaactgagggttgaaattacctgtgtcgattgcccacaagatactgccatcaacgatagagataccaaaagttgtactcgttgtgcgagaatggacaataatggcttcttcgttatttgggctgcttgcaatccatgtaagagagttaaaatggacatcattaggcgtattgttattcagaatttgagaaccactatattcgctggtatagtttttcgcccaaatcattttccctgtctgatcgttaaatttcagaaccagcgcatcttgcgccatcgtgttggttagtcggttagggctatcagtgccaaacatataaatgtcgcccgcggagtcccagactacatcatgagtatttgcatagtgattgccatcagcatcacgcatgtcgaattcaaggatgacattgcccatgatatcaattttgaaaaagcgacggccgtaccacgccatatcttcgtcgctgccggtatagaggtagccattgtggatccgcagcggctggagatgataaaccgataagaagttaaaacgcaggtcaccattttggtcataacctcggccagtggattccattaaccaactgtttccccatacagaggtaaatagtgcaggatcggtttgctcaatatcgaggtggaagatgacagatgtatcatattcctgatcttctgtactgatgataaatggctgattgaaaacttcagtacccgtgtcatccttaaatacgacctgcacactgtttgcatattgcgcataaagaccaataacagggattttaatggtttgcgtaacaccataaatgagatccgatgtataggtaaaatctacgctggttggactggtcgtcctttttgtaacagtgtaagaataacttaccggggtatctgaggtaaaataaaggtatgcagcgagctggttgtcggctggtgcaagttcagttttaatataagtaattgtcatgatggtattccttttatttcattcaataagatatatggtttttttgtcagcgcaattaagcatcgcctgtataaataacgagtaaataaacgtctgacggataattttgtgctgtgataattaaaagcgattttgtattctcattctcctattataaaatttatgtaaaaagaacatggttaatcatccggaaaataaagatgcgctgtattctctgcggaaatatacatgtcaaatgtgttaggttctattcaggatacatctttcgtgatagctgaaaatgaacgccatcctttatttccgtccagttgccgccccactcaacatcaacagatagctccttagcggcctgaaaaacagccgttgcaattgtctgataatgtttaaaatcccatgaaacggtaccgttgatgaccgcgaatacatcgacggcgtgccccgttaaatgcctgcttttagacgttaatgattttcctaatgctaatagctcaagctgtcgtttttggtttcttaccccttcagaaataccgaagtcaacaggcgataatttcaatgcttttctcatcacctccgaaagatctttatgtactcctttaaggttcttttcagtctttctactaaattcatgatttatcattactatctccagagattttcttccagtaataattaagagcaacaacacccattgcacctgatataccgctgactgcaagtgaagtatgaaatactgaaccaaggctttgtgacatcaacccagcaagtacaccggtaaatcctgatacaataatttgtgctaacgcagaaaataaacttcttcccgactggcctgacttaacgtcaaggagatatctgacaagtcctccccacgcgccaaataatattatgtaaagccagctaaaaaatgcatttgatgatgggtctttccatggcaaagcaattacctccatagggtatataagtaaaaaactttagctcttgatgagattatttttcctggtctaacgatttgcttttgctatgcgataaataataaacgttgagcaatcccgttttgtgatgaatatcacacggaatgtaattaatagtttttgccgatcgatatttgatgaatgatagttatgtgttattaatattaatgattctatttattagtggaatatataacagggacaggtgaggaggtgggggtaaacactaaaacggcaacgggcgccgtcctgcatttctcatgcgctgaaaagcaaaaagcctgctctaaaagcaggcttttcaaatttggctcctctgactggactcgaaccagtgacatacggattaacagtccgccgttctaccgactgaactacagaggaatcgtgtgaacgaggcgcatattatcgacctgcgtgcgccttgtcaaaggggaaaacaccgtttttattcgtttgccgagaatttcagcaaagcgatgatttaatagcaaatttgctttcaaattgcacagcaaaatgcgccgcccgcaggcggcgcgcaggatcagaacagaacggagtagttcaggccaaacgtacgtccacggcctttataagtataaagacccggtgcgccgtaggttgggctatacagccccggtgcgcgctggccccaggcggtggtgtagtctttgtccagcaggttttccacgctgaagctgactttgcccaccggcagggcgtagctgcccaggaaatcaacggtgttatagccatcaatcttcttaccgtcggcgtcagacacgtcgaaggtttgtgtgctctgcacgcgcagggcccagtcgcccggcgcccagttaacccatgcgctggctttagacgggctggcgctgtcgaccgtcagcttctcccatttcccgttttcacgcgtttcggacttgatggcgttaaagttcgccccggtgctccagtcgctgtcggtgaagaaatagtccacctggccttcaaccccatagatacgacgtttatcgtcctccagattgatggtcatgtcgctcttgttgatggtgatggttttatccgagagcgagtagtaggccgccacctgggtacgcaggttatcgccggtgaagcgccagcccagctcgtaagcattgaccttaataccgtccagcgttgagtcgttcacgttgacgctgttttgcaggcgatagtgaccatcgaccagctgataggtgccggagccgtagtacttcgccaggtccgggatctcgaagccctgggagaagttaaaccacagctgctgctgttcggtaagacgtccaaggatcccggcgttaaacaggaagttgttgtagtcggttttcccgcccggcaccgcgtcagcggaggtcgctttgcccgtggcgattgcctgctgctgggcgtagccgacaaaatcgtccaccttgttttcggtgtactggtaacgcacgccgccgctgagggtgatggcgtcaatgtcatagctggcttgcaggaacggcgcgaggttggtaatgctgtaacccggataacggcccacgttgtaggcattgtccagctccatgccgccgctcgccgccgctttgctcaagtcaaagaactgctggttggcatcgaatgtttcgtggtcggcatccacaccccaggtgagggtcaggtcgtccatcggcttgctgtttagcgtcagcttgccgccgtaaaaatcggttttctgctgggacgcgccaatgctggtcaccgcgcctttgctcagcgtcgggaacgggtagtaggtcaagctctcgtcacggtagtaaatctgcgcaaccagatcctgaccccagaaatcggtgttcgagtattgcaggttgattaggtgacgctctgtgcccgggatacggtcagagttcaggttatctttattataggctttggcatcgcccgtgaccgcagcgaaattctccccaaggaacaggccgtgcttgccgtcggattcgctcttgtagtactgcgtggttaactggagctgctgatgatcgtcgatgttgatggtgcctgtccccatcacgtcgatacggtcggaatactgcaagccggtctgggtgttatcgataatcacctcgtcgccgttgccgtcataccagccgccgtagcgctgataggagaccgacagacggccagaggcgttgtcattgccgccgctcacggctgcggagacgttctcatcatggtcgttatggctgttaaacccgctttttgccccggtctggaactccacctcggtctccggctggccttttttggtgacgatgttcaccagaccgccggtactgccgccgccgtacagcgaggtggcgccggagatcacttcgatgcggtcaatgttgaacggatcgatagagtcgagctggcggctgtcgctgcgggaagagttcagacgtacgccgtccaccatcaccatcatggagcgaccgcgcaggttcatgccgtagttggtacgtccctggctgctgacgtccataccggggatcagctgggccagcacgtctttaatctctttcccgccctgaacctgctgctcaatttccgcccgctcaataacccaggtggtttgcgccatctctgccacgctgcgatgtgcccggctggcggagaccacaatatcttcttccttttgttcttccgcccacgcagaggtagaaagcatggcaagcaagcacggatttaaaacccaaagatgagaacgtttcattgttatgttgatcctgaatgtgtgtgtcagtactcggtggtcttcattaatgatttaaaaacctggctgctctccgggctggtggtgctccgccagtggatcacgccgggggtggttgccagctcaaacggctcgtcatcgtgagcgcgattcaaaattcgcgccgcgcgccaggccatcaggctgagctggggttcggcaataccgagacggtgcatcccggcattgacggcaaacaggcggttgctctgcgggccgtcccattcaagggtgaaatcgttgttgatgcagaaggcttcattctcatccagacgcagtcgggaagnnnnnnnnnnnnnnnnnnnnnnnnnnnnnnnnnnnnnnnnnnnnnnnnnnnnnnnnnnnnnnnnnnnnnnnnnnnnnnnnnnnnnnnnnnnnnnnnnnnnnnnnnnnnnnnnnnnnnnnnnnnnnnnnnnnnnnnnnnnnnnnnnnnnnnnnnnnnnnnnnnnnnnnnnnnnnnnnnnnnnnnnnnnnnnnnnnnnnnnnnnnnnnnnnnnnnnnnnnnnnnnnnnnnnnnnnnnnnnnnnnnnnnnnnnnnnnnnnnnnnnnnnnnnnnnnnnnnnnnnnnnnnnnnnnnnnnnnnnnnnnnnnnnnnnnnnnnnnnnnnnnnnnnnnnnnnnnnnnnnnnnnnnnnnnnnnnnnnnnnnnnnnnnnnnnnnnnnnnnngtagcacttcgaagcggtgatacatggcgcgatagatggccagcagcgactccgtggtgatcccgtcggaggtcatcttctgctcctgcaacatctgacgtcgggcgtcgtcaccaagggtcgagaagctgtccacgtactccggcgtgaaatattcgttagcaaacgcggcttcatccagcgcgttgtagttgttgcggcgcgacacccagttgaggctcagcggctgcccccattccccacggaagatatttaaaaacagatccgcaccgctctggccgccgccgacgacggtgacgcgcttgcccgctaaatccggcgtgcgcagcatcatttcgctggcgtggaagcaggtgtcgtcctgcgcggtgacgcagtctgggagattgatctgcttcccaatccccacgcagacgtggcgcgccaggaagcgatcccgctgggtcacgacctcaaacaggccgttttgctcatcaaagctgacctgctgtacctgctggctgaaggccaggttagtgaggttatccgccgcccagcacaggtagtcggcaaactcctcgcgcgacacggtgcgctgctcggtggtgaggaaacggtagaactttttgcgctgtaccagatagttcaggaagctgtggcggttggtaggctccacggcgctgaccagatccttcaggaagctggtctgcatatggcagtccggcaccatcatccccgggtgccaggagaagtgcggcttgcgttcaagaaacagcgagctaaaaccgtccagcccctctgccagcgcggcaatactgaggttgaacggaccgataccaatgccgatgaaatcataggttttcattgcgctgactcctgggagaccagaaaaagagggttatcaagatcgcagacgtagttcggcagcatgcggctgccgccgtcgtgttcagagaaggtcagtttgaccgggttgaggatcacgcgaataatctgcggcttaaacaggtcgaacttcgcgaagcgcgccgtaagatccggatgggcggccatatagcgacgtaacaccagcgccaggatctgatagaagcgggtttcgctcacgccgcattgcagggtgaggggggatataaagcgcagtaccgtgacaaagttgccggtttgcaggtcgtggatgatgtaatccgcgctgaggcgcgccgtcaccgcttttacctgctccggcaggctctgcgcctgcgggaaatcttcatccaccaggcgcatgtcgccctggaaatccttcagcaaaatgcgctgcggaacgtaatctttcatcaccagcgtgacgttctggccgtgggcgatgagcgccaccccgtagcggcagagcaggtggtagaaggggatcaccgtcgcctcaaacagcttttccagccatgcgtcagcggttaaccccgagcgtttgatccacgcgtcaatcagcgggcgcccctggttatcggtttccatcagcgccgccatcagcaccgcctgttcgccatcctgtaaatagcaggatgggttctcgcgccagatcacccccagcatctcctgatagcggtacggcgcctcaggcaatgcggcataacccggatgcgacagatatccggctgcgggttcgccaagcacctgcgccccggagcgaatcagcgtggcatcgctggcgaactgctgctgtagccagcgcgaggccagcggaccggcggcgatatacttgcccggaataccgcgatagcaggaggtgttgtagatggtcagcggcagcttgatgtcatacggcgcgcgacggctggcgttggtcagcgtgcgcagggactgctgcgccagatactcatcgccgaactcacccagctccaccatctcaccgcgcgcgagctgcgccaggaaatgaatggcaattttttgctgccactgccacgggtgcagcggcaccggcagccagctgtcgtccagatccagctcctgccagcgggcgttgaaccgttcgcgctcggcatcatccatggcgctggcgagcagggcgttaatatcgcaatcggcgtcgctgctccagaccagacgctcgcgctgcacggcgacccagtgcaggcggaaacgcccgcgatattccggcgcgtacaggcgcagggcatccagcccccagccgcggcgtcccttgttgaaaataaacttcgggtgaccgcgcatcaggcactgtagttcgtccgggtcgaggtggatcagcgcatcggcatccagcgtttcacgcgcctgcaacagctgcatgtcaccccgcagcgtggcgtagagatcttccatgtgctccgccgtttgcgcgtcgctcatctccagcacggtggccagttgcagcagcgcgttttccgcttcgaccgccgcgccgctggtggtggtcagggtatcagggtcaatatgcagccagccccatatcccacgcgtggcgcgaaactgccagcacgcgttgcccatactgatgcgccagttgtccgccgaaaccggctcggcgcgcagggtgcgttcatattccagttcggcgaggatcttcgccaccatctcgcggttcactttctgccagagtgcgttcacagttccacctcgtggaagaagcggtgacgctcgctcatgatcagacgggagcgtttgtgcgggaagtcgaactctttcaccgtgtcgaaaccggcggacgccagatggcggaacagacgctgattgtcgaagcgcggctcggcgacaatgcgcgtggtgcgcggttcatcgagatacagatagtggctcaggccacgcagccagctgcggatgtattgcgcgccgcgccagttttcttcacccaccagcatgtgcagcccgcggtcaaagggctgccagcggtagtggcggccaatgcggtcttctgccgcccagtagagttcaaaatagccgaacggctgatcgtcaaagcagccgatcaccggatagcaataagtcgagtcgagctggcgacgcaggtagttctcctgctcggcctgcggaccggccatctcccagaaggcatttacgcgcgggttgttcatccagcgggtaaaacgctcgccgtccaacgccacgtccgccacgcggaagctcagggtgcgcttaatctgcggatcgtaacggcggtacacctcgctctgcgggcggtgagggcgcagcgggaagtacagctgacggctttcgtcaaactgcattccgccgctcgcctgcggacgttcgcctttcagccacagcggcagctgccagaaaatttcacgcgccagataatccccatgaacgaggctaaacagcgcctgcgcctgaggttcatcctgccaggctgcccacggcagggtaatgccggtcagggcgggcgcggcaacaaacagctggtcgagggcgtccaccagccagccgtccgggagcccggtcagccgctccagcgccgcgctgccgtcgagacccagcgtcagcggcaggttttgttccgtgaccgtgcagcgaaagccgtagccggaatggacgatattcgcgtttgccatcacgccttctccttataaaacgggttgctaaagtcgaaatagatcaccgccggatcgacgatggtgttttcgttgcgatcgtgcagatagcagaagaagttgcctttgcagttccaggtcgggctgtcgagcacgtaatcgaggcagcgggtctgcttcgccgtggtgcgcagttcggccagcgcgtcacgcacgcgggacatcaggttctcttcgctgtcgaaaccggcggcggcgagcgcggcggtgacggcaagggtagagttcagcagcaggtaataagggaagtagcgcagcagctggctctcaccgaagcggttttccacctcggtttcacctgcctctttcagccacgcgtcggccccttcggtccaggcgctgccctggcagtcgcggtagatcagcccaacggggaaatcctgctgcatctcaacgaggatattttgctggtgcgccagcaggaccagaccgtagtccgcctcggcgctgaacagcggaagcaatacccggtcgcagtaggcatccagccagcagcgcgcggcctgggcgaggggtaagtccagacgctggctcagacgacgcaccgccgcggcgagcaggctgtcgccgccgtccggcgcggcctgggtcaggctcaccagcacgttggtttgcgtttcaggggtatcgaacagcaggttgacgcgcagggccatcaggctctcttcctgaacgacgccgtgctcatcgcgcagccccgcccagccgtcctcctgcatcacgcgcatggtcgggtagcgcgcctgaagttcctgccagcgtgccgttttcgccagccgtgccaggcgcatgccgcgcttaacctctttcaccgacagcgtgcgcacggagttggtcaggcgcacgctcagggaaaacttaatcatgtcgctgttggtttcactgtacagcgagcgggaagagctggtgggcagccattgcgcaccggcttcgcccagatcgcgcagggcgcttttttctaccagacgctggcaccagtcctgctccagcagatagtcggcctgccacgggtgcatcggcagcagccagcaggtgtcggtgaaatgaccgagaagggccggcgcgctctgcgctgcaaagcgcagcagacgttcccgcagggagacattcaggctgtcgccggtaatcagctcatgctcaaccgcaaaccagcgcagcgggaagcgggaggcgaaatccggcagatagcgacgcgcctcggcctcgttgaacggctcgtgcgactttggggcaggatgaaaagcatggccgaccagcagcgcctgttccgcttcggcaaacgtcagcggcttatcgcgcaggtttgcccagttgtggcgtaaatcaatggcctgccaggtgtgcgtatggctttccaggacgcgctgcttaaagcgagccagcgtatcagcatccagatcgccttttaccgcctctttttgaagaatgaaatcaatcagttgatgaaatgtgaccgtgtcaccgccgtcgctgtcggcctgaatcagcgttgccggaaaacgatactggtgatgctgcgtgggggagaaatagcgtaccggaacccgaatggcctgggttggggaaagcgggatatgaatctgtgataactcatccgcacgggttgcgggaagatagtgccagtccttcgtttcgcgcagcagcgcgttcaaaaaacactgggccgcaacatctgtaccggcggagcggggcagagtacgcatagttgtacctcattccatgactgataataattctcgttatgatattcattctgtttacagtggcaactatttttgcaatatttgttttcataaacttcataatttccacacatttattgacattatcttcacaattttatgcgtacccgtactgagaatctcactgacgttgtgacccctaaagctaactggcccctggcactgggcgccggtttattaggtattgggcaaaacggtttgctggttatgctgccgcagctggtctccctgaccggactgtcgctctccgtctgggccgggctgctgatgttcggctcgatgctctttttacccgcatcgccctggtggggacgccagagcgagcggcacggctgtaagatcgttatgctggcctcgctgggaggctatctggcgagctttgtcgtgatggcgctggtggtctgggcgatggcgaacggcgcgctgaatgctctctggggaatggcaggcctggtgctgtcgcgcatgctgtacggcctgacggtatcagggctggtgcctgcggcccagacgtgggccattcaacgcgcggggctggataaaaggatggcggcgctggcgacgataagctctggccttagctgcgggcgtctgctgggaccgcccctggccgcgctgatgctcagcgtcagcccggtcgcaccgctctggctgatggcgctggcgccgtttatcgcgcttctgctggtgctgcgcgaagccgccgatcccccgctgccgccggtggcgcaccagtcgacgcggttacaggcctccatgctgcctttcctggtgctggcactgctgctggcggcgctggtcagcctgatgcagcttggtttatcgccgcatcttcacccgttatttaatggcgatgccgtgcaaatcagccatcatgtcgcgctgctgctgagcctggccgcgctggcgaccctggcggcgcagtttctggtggtacgcccgcagcattttaccccgagagttttactcttaattgccgcggtcttgatggtggcgggtcttgggctgatgtgtctcgccagtttagccctgttctacgtgggaattgtcatcacttcgctgggggccgccatggcaacgccgggataccagcttttgctcaacgatcggctgacgacgggcaaaggcgcaggggtgatcgccaccagccatacgctggggtacggggccagcgcgctgctggtacccgtggtgacgcgcttttacggtgagcagtttttgattactgccgcatggggaatggcgctgctgtttctcgcggtgagcgtgtgggtacgatcgaccgatcgtacctctgctgaacattagtggaacggatgagaggatgtgctggctgcgtcctcactttgccgcagacgctggagcggatcctgctgataaaactggcaaaaacgctgccacagcgccgggaagcgcggagcgaaaagctcaggtgcgctaaagaaatactcggacagtaccgcaaaacactcggcgggatcggtcgcggcataggcatcaatgctggccgcgctttcacccaccaggtctatctcatcctgaatgttttccatcgccgcgtgcaggtcgtgctcccatcccgcgacttcacgcagcgggatcagcggcacgccgctggcgcgatcgccgttgcgggtatccagcttatgcgccacttcgtgaatgatcaggttgaagcccgaggcatcgaacgagtcctgaatatccagccagttgaggatgattggcccttgctgccagctttgcccggactgcaccatacgctggttgtgcaccagcccgatgtcatcctcccactcatcatcgacgataaacggcgccgggtagatcagcacttcgtggaagccatccagccattcgatacccagctccagcaccggcaagcagaagagcagggcgatgcgggaatttttaagcggatccagttcgaagccctgtagcggtaccagccgtttttgctgtaaaaaacgctcggccagctgaatcagctttgattgctcttcaggcaagagattcgccagcacggggatcgccagagcctcatcccagggcagcgccatatttcgaccagcgtcgttcgttttccagggccacttaatcatcgctttgctcgttactcgcacgtgaacaaaatggaaaggtcaggggctgttagcatgccaacatactctgttaagcagtatgacactcctcttcggctgcatgcagactggcagcctgtttaagaggaatccagcccgcataaactatcactatgtgccgtcaggttgatagcgctttaggggtatccccttcattttgtgaagtatgtcgtgcgcgactatgataaatctcttcttaccctaccgtgcttaaggatcccgtcagtatgcccgtcaattttgacctcaacgatctctatgccttccgcgctttactggaatatggcaatttccgtcttgcggcggagtctatctgcctttcccagtcggcgttgagtcgcagaattgaaaagctggaggcggcactggggacaaaactgttcgacagaaccactcggcgcgtcacgctgaccctgtatggacagacctttgccgaccgatgcggacagctgcttgctgatgtggagtccatgctttcggatatcgataaggccagcgaggagcgtacggggctaatcaccgtggcgacggtgccgtccgccgcctgttactttatgccggatgttatccgccgctttcagtcccgttacccccgcgtgcgcataaaactgatcgacagcagcgccggaaatgttatcgaggccgtcacccgcggacaggcggattttggtatctgctttgcccggagtttgcagcccgacatcgagtttgtcccgctggtggaggatgtctacgtggctgcctgccggcgcgacagcccgcttgcaaaaagaaaaagcctgacgtggcaggctttttatcagcaggattatatcggtctggataagacctccggcaaccgcaatcttctcgaccagcgggtcgggcatattcggcctgagcgccccagcatctgcgaaacgcggcacgtgacgaccatgctggggatggttgaagccgggatcggcattgcggccgttcccgccatgtcaatgccccgcgcagagcattcgctgctgacgtcggtacctttaaccgagcctgaggtcaggcgaaccgtggggctgatccgccgccgcgggcggatccagtcctatattgctgccgaactcgaaacgctaattaccgagcagtatcgcgaggtgcactgacgggcgttaagcccgttgccgtaatgacgctggcggcctgtggcgaagagagaaaggccagcagagcttttccctgttcgggatggtcagccttctgcgttacggctccggcgaaacgggtaatgtactgcatgtcgtcaggcaacttacccacaaacgtcacccccgggaccggcagaagctcgctcacctgctgaaagccgagatcgtatttcccttttgccacttcagacgccaccgggatgcgctcaacccggtgcgctttatcgtggacctggccgtcgatgcccagcttacggaacagctggctctctacataccggccgctggcgctgtcggaataagccatggaatgcgccttcagcagcgtttgccgcagggcaggcaccgtattaatatccggcaccggcgcgcccgctttgacgaccatcccgacgggcgaatccgccagctccacgcgagagcccgccgccgtcctgcgatcctgttccagtttcgccagcgcatcgcccaccataatcaccacgtccgctttttcgccccgggcgagccgggccggaatggcctgcggcgttttgcccatcgacgggccggagatcacaatgagcctgtcaccgctttgcgcttcgtactgcggcgtcagcttctccagcgccgctttgaagccgccagaaatcatcaccgtcacatcctgcgcaagcgcgcccgcgctgagggtggcgaaggtcagggcggcaatcaccgttctgaatgtaagcatgagggatcactccttaacggcagtttgcaggattaacgtgcgacgacgatagagataaagcgttgccagcagggcgcaaacggcggcaaagctcatccagtagcccggggaggctttgtcgccggtgtactcaattaaggcagtcgaaatcaccggcgtgaaaccgccaaagaccgccgttgccaggctgtaagccagtgagaagcccgccacgcgcacctctgctggcatgatctccgtcagggccgggatcatcgcgccgttatacaggccgtagaggaaagagagccacagcagcacggtcagcatcattgagaagctcggggctgcggccagcatcgtcagcgccggatagctggtcgccagcgccagcagcgtcatggcgatcagcactggtttacgtccgaagcgatccgacagcgcgccgcccaccggcagccagatgaagttggacaccgccaccagcagcgtgacaagaagactgtccgatgcgctgagcatcaggacttttttaccgaaggtcggcgcgtaaacggtgatcaggtaaaacgcggtggtggtcatcgccaccatcagcatgcccgcgacgactaccggccagttggcgagcagcgttgtgaagacctgacgcattgccagatggtggcgacgggcgctgaattcctcggtctcttccagcttgcggcgcaggaaaaagataaacggcacaatcagacagccaaacaggaacggaatacgccacccccattcgcgaatggcactctcctccagcaccacattcagcgcaaagcccatcgccgccgcgatcataatggcgacctgctggctacccgactgccagctggtgtagaaacccttgcggcccggcgtggcgatctccgccagataaaccgaaactccgcccagctcggcgcctgccgaaaaaccctgcaacaggcggccggtcagcaccagcagcggcgcccacaggccaatgctctgataagacgggatcagcacgatcaggaaggttccggcggccataattgacagggtgacgatcagccctttacggcgacccactttatcaatgtaagcccccagcacaatggccccgatcggacgcatcagaaagcccgcgccaaagacggcgaaggtcatcatcagggacgcaaattcactgcttgccgggaaaaaagtatgggcgatgtaggtggcataaaagccgaacagaaagaagtcgaattgctcaagaaagttgcccgacgtgacgcggaaaatcgcgcccgctttggcacgaaccgttgcaggtgaggttgaggaaaccatgattatctccagttttatagtgacgttatgctcgtctgtttctgaaaactggatcaggaagtggaaattaataagcgcaaatagcgcatgaaccgatgcgtgtggtgcattaatgacaatgcattgaccagtatttacatactcaacaataacttaacatttcgatgatcttttatttactcgatttcgctaagttgctgatatatcagttttgtgacatcgcgcaggtgagaagccaggcggggcctggctcgggattattagcgcagcgcgttcgcaatcgcgctaaacatcagcgacgcttccagcggctgggcgctgaatgacggctctgcctgcggccaggtggaccactggacgataaccagattttctttctgattaaccatgatcatctgaccaaaaatacccagcgcccacagggaatccttcagcgaattttcgactttcggctccacgtgtgtggcggtgactggcacttcgttgttccaccactggtagccgtacaaccccttcggatgcgcctcggacaccgatcctttggcctgtgtccaggctgaggactgtttcacccagccctcggggaggatctgcttcccgtccggcagcgtaccgttatgcaggataaactccccgaaacgcccccagtcttccagcgtggcgttgaacccatgcgcacccacgtcgtgctggcctttgctgtaggcatgccacacgccgtcgctcgccatgccgtacggctgccagatggtcttctccagatacgccgcgagcgtcatgccggtggcgcgctcaagcacatcgcctaacagccaggcgccacccgaggaataggaccagttttcgcccgccgggtgttcacggtgtaaccccttcaccagggtgcgcacgcagttgtaggtgcccggcttcgcttcgcattcggtaagccgggcgaagtcagattgcgggttggtgtaatcttcgttccacgccacgccagaggtgtgggtgatgagctgtttaagcgttacgccctcccaggcggtgccttttaagtcaggttcgtattgggtgacaaggtcgtccagcgagtggattttcccttctttaattgcagcacccaccagcgcggagaccaccgatttgcccacggaacgcgacgtccagagcgttgagtcggtattgccttcacccaggtatttataggccactttgccgtttttcagcaccagcatgccgctgacgttctggcgtttcaggtaatcctgaagagtgtaactcttacccttcacctgatagcgggcatcggtgagcggtttttctgcgggcggcagcggcgtagcgttgccgtggcggaacacatcccctgcgtagttgcggtagtcattgcgaaagcccaccacgcgatcggcctggttccaggtgagcatggtatgcgcgtccgggagtctggcatcgaaaggcgccggacaggtggtgaggtcggtaccgttgcaggccgccataacggcgggcgaaagcaggctgctgacaaccagcgccgcgagcagcgtgcggtttgttttgattttcatatttatctcgtttggctcaggaaggacttcagtttaagaacctgcggcctataataaaaaacgcgttatgggggaaaatcccccgtaaaaattgcgtggagaatggcgtggcatcactgatctattcctttgcccagcttgaggcgttcactgccgtcgctgaacacggcagcctgatgaaggcggccagtaaactcggcaaagatcgtactaccctgcgggatctgatcgatttccttgaggatgggctgggctatgctctgttcctgcgggaggggcgcagcctgcgcctgacgccggagggggagcagcttcagcggcaggcgcacctgctgatgcgccaggtcaaagcgtttgaggcgtttgccagatcggtaccggacagcgcgacgcaggacatcgccctcgcttacgatccgttcacccccagagcttttttacaggcgctgattgccacactggcgacgaaaaagatccgcctgagcctgaccagcgcatcgcgcgatgaggcggaagcgatgctggcaaacggtcaggccgatctggggatctgccaggcgcgcaaccgcagcgtgggcaatgagatggagtggcgggcgctgggggcgatcgaaatggatttttacgccgcaacggcgctttttgcggaggttgcgtcgtcggtgtcgctgctcgatctctctctggtgccacaggtgattatgcatcccgcgtcagacgagccggttgcccgtcgcctgcaaatttcagggcacacgcttttcactaacgaactggagatgctgcgcggcttgctggaacagggctgcggctgggggtttttaccgacccatcttcaggcaacgcagtggaaaaatgtaaaaaggctgcccaccgaagtgggcagccaggggataagccagacgatggtcactatctggaagccgggcagcgacaagcgcgggttgatcaacgatacgctgtcgctgcttccggcgttatggaaacgttcagcgctgtgagcaccctttgcactgtttattctggatctgctggaagaagtcgttgcctttgtcatccaccaggataaacgccgggaagttctccacttcaattttccagatggcttccattcccagttcaggatacgccacgcactccaggctcttgatgctgttttgcgccagcaccgccgccgggccgccgatgctgccgaggtagaagccgccgtgcttatggcaggcgtcggtgacctgctggctgcggttacctttggccagcatgatcatgctcgcaccgtgggattgcagtaggtccacgtaggagtccatacgcccggcggtggttgggcctaaggagccagacgcgtaaccttctggcgttttcgccgggcctgcgtagtaaatcgggtgatctttaacgtactgtggcagttcttccccgttgtcgagcagctctttcagcttcgcgtgggcgatgtcacgcgccacgatgatggtgccgctcagcgacaggcgggtggataccgggtgcgaggaaagctgcgccagaatgtcgggcatcggcttgttcagatcaatgcttaccacgtcgccttctccctgctggcgcagggattcaggaatatactggcccggattgtgctccagcttctcaatccagatcccctcgcggttaatcttcgccttgatgttgcggtcagcggagcaggagacccccatgccgatcgggcaggaggcgccgtggcgcggcagacggatcacgcgaatatcgtgcgcgaagtatttcccgccgaactgcgcgccaaggccgaggttttgtgcttcctgaagcagttcctgctcgagctggacgtcgcggaacgcctggccgtgcgcgttgccttcggttggcaggccatcgtagtagcgcgcagaggcgagcttgacggttttcagcgtggcttccgctgaggtgccaccgataacgaaggcgatatggtaaggcgggcaggccgcggtacccagagttcgcatcttctcaaccagataatttttcagcttcgccggggtgatcagcgctttggtttcctgatacagataagttttgttggcggaaccgccgcctttcgccatgcacaggaatttatactcgtcaccatcaacgctgtagaggtcgatctgagcgggcaggttggtgccggtgttcacctctttatacatatccagcgccgcattctgcgagtagcgcaggttgtcttcaatataggtgttatacacgccctgactcagcgccgcttcgttaccgccgccggtccagacgcgctggcctttcttacccataatgattgccgtaccggtatcctgacaggttggcagcacgccttttgcggcgatttcagagttacgcaggaactggagggcaacgtatttgtcgttctggctggcttccgggtcgttgagaatggcggcaacctgcttctggtgggaagggcgcagcataaacgcggcatcgtggaaggcctgctgtgccagcagggtcagggcttcaggctccactttcaggacttcctgaccgtcgaactcggcaacggaaacgtgctctttggtcagcagatagtattcggtgtcatcgtgcgcaagagggaaggggttttggtagataaacggtttgtttgacatagcgtattgctccacaaaaataaaaccgccggaggagaagtccggcggtcaggaatcagaacatcatggacatccacgggtaaccaatcagcagcagagctgccaggaagatggcaccgaagatggtaccgaggcgccagtagtctttggttggcaggtagccgctaccgtagtaaatcgggcttggaccggtaccgtagggggtaatgatccccatcacgcccagcgaggtcaccatcagcagaacgaacacttccatattcatgcccggaatggtggaggcgatggtcagcatcgcaggcagcagcgccgtggtgtgcgcggtggtgctggcgaacaggtagtgcagcaggtagaaagccagcagcagcacgatggtggcgacacccggagagataccgctcatcagcaggccgccttctttacccagccagctgataaaaccggtggaggagaggccatccgccagcgccaccagggtggcgaaccagacgaaggtattccacgcggctttgttaccggtgatatcgttccactccagcacgccggtccacagcatcaggccaacgatcagcagggcagccatggccggttcaatccacgccgcggcgaagatccacatcagcagcgcacagcacacgaacaccagcagcaggatctcattgcgcgacagtttgcccagtttttccagttcacgggtcgcccacagcggtacttcgttgtttaccttcacttccggcgggtagaaccagtaagccagtagcggcatggtcaggatcagcaggatgcccagcggcaggaaggcgaggaaccaggtcccccaggagatatcaattccaaccgtgctttttaccagcgccagcgccagcaggttaggtgccagagcggaaaggaacatcgagctggtgatacaggccgcggtgatggctacccacatcagatacgaaccgattttgcgcgcgcttgggtcattgggttttgaaccgtacagcggcggcaggttggcgatgatcgggtagatggttccgccgctgcgcgcggtgttggacggggtgaacggggccagcagcagatccgcaaacgtaatggcgtaaccgagcgtgaggctgcgacggcccaggtacttcaccagaatgagcgccagacggcggccgaagcgggttttgtcgtagcctgcggcgaacataaaggcaccgaaaatcagccagacggtggagttaccaaacccgctgaccgcccatttaaaggaggcgcccgccagcttgaattttgggtcagccagctgttccgggctaaagagcacccactggctgcacagcgcaatcgccacgacgccggtaagaccgatcacggcgcccggcagcggttcgaaaattaagccgacgatgacgccgacaaagatggcgaagtagtgccacgcataaggcggcagcccttccggaacggggacaaacaacagcaggacggcaacaatgacgggcaaagccatcatcagcagtcgttttgctgttccatttgatgccagattcgccgcaggaggcgttacagcagtttttgtattcatagtttcacgtcttaagttgtcaaaaattcgtcgcccggcgaaaacacaaattctattgaaatatcctttttgctttttttagttatttaaggtgcggatttgtgttttcactaatagcgatttaacgcattttggtttgcgctaaataaaaaatgatgatgtttttatattgctcttttgaatgccataactattgatcgcgataacaaaaaacggaactgaatggctatttttatattttttataataaccactctgagtagtgtggttattcgctaattttacgcatcttatgtatcaaaactataacatttgaattctggtgcttttgtttgtcgttgttttgtaaggttttttgatagatttggtgtattggtttgaccttttataatttaactttttttaaattcttgtgaacgagtgaaacattcctgctaacaccaatgtgttattaatgttatcgaagggattaaatagtttattaactaacgtaatgactttagaaactaaaaaaagactttatattaatatcatgacatcggcaaaaaacaacgaaatnnnnnnnnnnnnnnnnnnnnnnnnnnnnnnnnnnnnnnnnnnnnnnnnnnnnnnnnnnnnnnnnnnnnnnnnnnnnnnnnnnnnnnnnnnnnnnnnnnnnnnnnnnnnnnnnnnnnnnnnnnnnnnnnnnnnnnnnnnnnnnnnnnnnnnnnnnnnnnnnnnnnnnnnnnnnnnnnnnnnnnnnnnnnnnnnnnnnnnnnnnnnnnnnnnnnnnnnnnnnnnnnnnnnnnnnnnnnnnnnnnnnnnnnnnnnnnnnnnnnnnnnnnnnnnnnnnnnnnnnnnnnnnnnnnnnnnnnnnnnnnnnnnnnnnnnnnnnnnnnnnnnnnnnnnnnnnnnnnnnnnnnnnnnnnnnnnnnnnnnnnnnnnnnnnnnnnnnnnnnnnnnnnnnnnnnnnnnnnnnnnnnnnnnnnnnnnnnnnnnnnnnnnnnnnnnnnnnnnnnnnnnnnnnnnnnnnnnnnnnnnnnnnnnnnnnnnnnnnnnnnnnnnnnnnnnnnnnnnnnnnnnnnnnnnnnnnnnnnnnnnnnnnnnnnnnnnnnnnnnnnnnnnnnnnnnnnnnnnnnnnnnnnnnnnnnnnnnnnnnnnnnnnnnnnnnnnnnnnnnnnnnnnnnnnnnnnnnnnnnnnnnnnnnnnnnnnnnnnnnnnnnnnnnnnnnnnnnnnnnnnnnnnnnnnnnnnnnnnnnnnnnnnnnnnnnnnnnnntttggagtttctattatgagcactaacgaacgtattttaagccccttcacattaccgaatggtactgaactgaaaaaccgtttgttaatggccccgatgacaacctgtaccggttattacgatggcaccgtgaccagcgagctggtggagtactaccgcgcccgcgcgggcagcatcggcaccatcatcgtggagtgctgttttgttgacgatctcggcctggcgttcccgggcgcaattggtattgataacgacgagaaaatcgccgggctggcaaaaatcgctgacgtcatcaagtcaaaaggctccaaagccctgctgcaaatctaccacggcggccgcatggtcgacccaaaactgatcgggggccgcacgccggttggcccaagcgccgttgccgcgccgcgtgacggtgccgccacgccggttgccctgaccgcggaagaggtggaaggcatgatcggcaagttcggcgaagccgtgcgccgcgcaattcaggccgggttcgacggcgtcgaaatccacggggcgaatacctatctgatccagcagttcttctccccgaactctaaccagcgcgacgacgagtggggcggcagccgcgaaaaccgcgcgaaattcccgctggcggtgctggacattacccacaagatggtgcgccagtacgcggacgacgcgtttatcattggctaccgtttctctccggaagagcttgaagtcccgggcattcgcttcgaagacaccctgtatctgctggaaaaactggccgcgcgcggggtagattatctccacttctcccttggcgccgccctgcgttcatctatcgtcgatactcaggacccgacgccacttatcgaaaaatactgcgccatgcgctctgacacgctggcgcaggtaccggtaatgggcgttggcggcgtggtgaatgccacggatgtgaatgaagcgctggatcacggttacgacctgattgccgttggccgcgccaccatcgcctatccggactggaccgatcgcatcgcggcgggcgaaagcctggagctgtttatggacagtacccgacgcgaagaactgagcatcccggaaccgctgtggcgcttctcgctggtggaagcgatgatccgcgacatgagcatgggcgaatctaaattcaaaccgggcacctttattgaaaaagtgcaggacgatgctaacgagctggtgattaacgtcagcctcgaaaccgaccgcatcgccgatatcgaactggcctccggcccgagtgaagacgtcgagtttgtcaccagcttcgaagagatccgtacccgtattctggatgccaacaccccgcacgtggacgcgattacgggcgcgaccagccagagcgaggcggtgaaaaaagcggtctcgaaggcgatgctgaaatccagcaaagcgctggcggcggaagagggcgcagacccgaatgagactaaaagcgtggatgtggtggtggtcggcagcggcggcgccggtctggcagcggcgattcaggcgcatgacgaaggcgcgaacgtgctgatcgtcgagaaaatgcccaccatcggcgggaacaccattaaagcctcggccgggatgaacgcggcggagacccgcttccagcgcgtgaaaggtattcaggacagcaaagagctgttctaccaggaaagtctgaaaggcggtggcaacaagaacgaccctgaactgctgcgtcgctttgtcgagaacgcgccgcaggccatcgaatggctggccacgcgcggcattatgctgaacgacattaccaccaccggcgggatgagcatcgaccgtacgcaccgtccgaaagacggttccgcagtgggcgggtatctgatcagcggcctggtgcgtaacgtcaacaagcgcaaaatcgaggtgatgctggatacctccgtgagcgacatcattttcgaaaacggcgaagtgaccggcgtgcgtctgaccaccgaagagaacgaaaccctcaccgtggcaactaaaagcgtgattgtggcaacgggcggcttcagcgccaacagcaagatggtggtgaaataccgtccggatctggcagggttcgttaccaccaaccacaaaggggcgaccggaggcggtatcgcgctgctggagcgtatcggtgcgggcaccgtggatatgggcgaaattcagatccacccaaccgttgagcagaaaacgtcgtatctgatttccgaatccatccgcggcggcggggcgattctggtaaaccagcagggcaaccgcttctataacgaaatgtcgacccgcgacaaagtctcggcgcagatcatcgcgctgccggagaaatacgcttacatcgtctttgacgagcatgttcgcgccaaaaacaaagccgcggatgagtacatcgcaaaagggtttgttaccagcgccagctcgccaaaagccctggcggaagcgctggggatggatcaccaccagttcctggcaacgctggaacgctacaacggctttgtggagaaacagcacgatgatgatttcggccgcaccaccgcgctgcgtgcgccaatcaacgaagggccgttctacgccattcagattgcaccgggcgttcaccacaccatgggcggcgtgaccattaacacagaaacctgcgtgctggacagcaagcacaacgtattgccgggagcgtttgctgcgggtgaggttgtcgggggcatccacggcggtaaccgcatcggcggtaacgcggtggcagatatcattatttttggtacgcttgcaggacatcaggcggctatgcgttcgaaaacacggtaaggctcctgtttccccggcggcgcggtgcctgccggggctacatctgaggactcatgaaatgcctgatagccatcgcgtttacagctactccgccgttctgatgggatcgcccatcctcctgaaactcttttcccaggacgaagcgcttgcctctcgcgtgtttcgcctgatcaaacagtacgaagatctgcttaccgttaaccgagcgcactcccaggtaatggacatcaaccatgcggccggtcagcatccggttgccgtcagtcgcccggtgttcgagctgatccgctgcgcgaaagcggccagcctgcttaaagacagcgcctttaacctggcgatcggcccgctggtgaaatgctggaaaattggctttaagggggacgctgtaccgcccgcggacgagatcgccgccttgctgggcatcacgcatcctgcggacgtggtgctggatgaagccaacagcagcgtgttccttactcgccagggaatggagatcgatctgggggccattgctaaaggctatatcgccgacagggtgcgggatcacctccttaaagagggcgttgaacttgggctgatcaaccttggcggcaacgtccagacgttaggctcgccggagggcggctggcgcgtcggcctgaaaaaaccgttcgccggtgacgcgctgattggcgccatgacggtcgaaaaccggtcggtggtgacgtcaggcacctatgagcgctacttcgagctgaacggcaaacgttatcaccacatacttgacccacgcaccggctacccgctggataacgaactggacagcgtgacgattatttcgccagactccctcgacggcgatatctggaccacgctgatctacggcatgggcgtggaaaagggctgcgccgcgctgcgttcgcgccccgatattgaagccatctttgtcaccaaaacaaaagaagtggtgatctcctcgatgcaccacttccgttttacccttctggacgacagctaccgaattactggcagtactgtttgagtaggccgacctgttccggctgcaaacggtagcgatataccggccggccggtagcgccgtagtgaatgctggtgaacaggatattaatttgcgccagccagatcaggtatttgcggcaggagacgcgggaaatgttgaccgcattcgccagatcgtcggtggaaaactctatctccggatggctgtcgatccactggcaaatggtgcgcagcgtctgcggcgtcaggcctttcggtaattttttgctgtcggccagctccggcgcgccgccgtggatcagcctgtcgacgtcggcctgttcataatactgatgcgatcccatcaggctgcgctttgccttccagccgttcagcgcctcttcaaaacgcgggaactggaacggtttaatcaggtaatccaccacgccatagtgcattgaggtctggatcgttgcggcgtcggaggccgacgagatcatgatgacatcaatcgggcggcccgacgcgcggatgatgggcagcagatccagcccgttatcctgctgcatatagacatccagcagcaccagatcgatcggctggcctgggttggcgatcaacgcctcggcctggttgagcgtggaagcgacgccgcagcagctaaaaccctcaacgcggttaacatacagacggttgaggtcggctaccatggcgtcatcatcgacaattaacacatttatcacgcgatattcctctcgctatcccaggggatctgaacaaaaaattgggtaaatacgccaggctccgactcgacggtaatatctccgcccagattctggatctgctgacgcgcaaggaacagcccaacgccgcggttttcaccttttgttgagtagccctttgtaaaaatagcctccagccgctcgggatcaatgccgggaccgtcatcgctgacctcaccgcttagccagccgttctgataatgcagcagcaggccgatctcgccttccggctggccttccatcgcatccagggcattttcgattaaattgcccagcacggtgatcagcaccgcaacctgctcttcattggcggtgtcaggaagctgactttcctccgccagcgtcagggtcactccggcctctttagcgcggttaattttacccagcaggaagcccgcaatgaccggggatttaactttacgctgtatcgcgccgatatccgtctgataattctgcgcggtctggatgatgtactcctccagcttatcgtagcgcttcatgtgcagcaggccgaggatcacgtgcagcttgttcataaactcatgcgtatgggagcgcagggcatcaacgtagctgaccatgccatcaatacgctgcattaactggctgatttcggtcttatcgcggaacgtgctgatcgccccgatcacctgattctggcttttcacggggaccatgttgcacagcagcagccgcccgttacagccgatctcctgatcctggcgggcaatgccggtttttgacacttcgcgcaggctggccagaagcggttcactgctgctttcggagtgctggcccgaggtcaggagtaatatttctctggcggtgtggttaatcatcgtcacgcgcccgtgcatatccacggccatcacgccttcgcgcagggactgcaacatggcctggcgctgctcaaagagggctgagatttcgtaaggctccagcccaaagaggatacgtttcagaacccggaccagaccccagatcgccactgagctcatcagaacgctgaataagatggtccacacggcgttgagccgcccgcgggcaatctgatcttcaactttattcagcgaaatacccaccaccaccacgccgatctggtcgtgctggtcgtcatacacgggcgtaaagacgcgcagcgcttccgcgagcgcgccgcggttaacggagacattctctttcccttccagggcgggcgtcagatcgtcgccaataaaatgcaaacctaacagcgcttcgtttggatgggaatagcggatcccacgcaggtcggtgaccacggtaaacagcaggtcgttgcgcttcgtcaccgcctcggcaatcggctggatgatgccagcctgcggcgattccatcaggccacgcttgatctccgggctgtcggccagcgtccgggcgatacccagcgcggtatctttcacgtcatcgcgcgtggcgcgggtgatctgcacagagtacagcgcgaagaccaccagcagcaccgagccgataatcgcgcacaccatcagcgtaaccagcgtattcagcttcatagggcgcttgcgcgtcggggggaagggctgcaaatcgctcattaacactccgcgatgaataagaaagggctaattatcgctgatgacgggcgtttcataaagccatgtaaagagaggcgtttcgtgagcctcctctcaggtgacctatataaaacactttatagtgtgagggtactcataataaggaggcagtttatgagcattatgcttaccggtacggccagggaaagacggcacgccagcaccacgaacatcgacagattatcgacgctggatatgcttaacgtcatacaccaggatgacgcgcaaatctcttctgcacttacccctcacttaagtatgctggcccgcgtggtggataacgcggcggcgacgcttagccacggcggacgtctggtactgaccggcgcgggcgcgtccggacgcgtggctgaacaggcggcagaagcgtttgcgccgggaaaacatcccgtcattgcgatgacagcaggcgatcacgccggtagctacgcgcgcggcgttgccgaccttcagacgatagaatttggcgagcatgacatgatgctggcgctgtccgtcagcggcaaaaccccatgggtatggggcgcgatgcgtcatgcgtggtctctgggctcaacggttgcgatcattacggaggatgcgcaaagtgaagcagcgcagctggcgagcatggtcattgcccccgaactgggcgcggatgtggtggccgggtataccaacgctaaagcaggcattgcgcaaagcatgatcctgcatatgatcaccaccggtctggcggtacgttccggacgggtgtacagcaacctgcgcgttgatctggaggcaagcaataccagatgggccgaacgacaaattgccattgtgatggaagcggggggatgtagccgggctcaggcgaaggccgcgctggaaagctgtaaccaccagtgcaaaacggcggtactgatggtgctgacagggctggatgcctggaaagcgcacgaattgctggcgcagaataacgggtttgttcgcctggccttgcaggaagcgccataacatttcagcgtcaaataaaaaaagcccgcatcgcgggctttaatattgatgggaattagaactggtaggtcatgcctacgccaacgatgtcatcggtagaaataccgttgtcattgtagaaggcatcatcttcgtccagcaggttgattttataatcaacgtaggtggagaagtttttgttgaagctgtaggtcatgcccacgtcgatgtagttaaccagatcctggtctacatagtcatagccattgcctgggtgataatcgttaccgcccaaatcgatgcctttagaatagacccacgccagggatggacgcagaccgaagtcaaactggtactgcgctacggcttcaaagttctgtgttttgttggcgatgccatcgttgccgtacggagtcatgttacgggtttccgcatacatcatggccaggtaaacatcattagcatcgtatttagcaccgattgtccacgcttccgcacgttcaccgccagcatatttgctgaagcggttataggtgccagcgccgtaagcgacctggtcgttagtacggtcagaggaagaataagccgcacccagcgtcaggccgaaatcgaagtcataggtggtagacataccgaagccgtcgccgttctggaaacgaacgtcatcatggccgtttttggtgccttcctgattttcgtttggtccaccttcattatttccctgatattgcagcgcaaagttcaggccgtcgaccagaccaaagaaatcattgttacggtaggtcgccacaccgttagtacggccaaccatatagttatcggtccaggtgtaagaatctccaccaaataccggcagcatatcggtccaggcttcaacgtcatacacgacgccgtaattacggccgtaatcaaatgagccgtagtcgccatatttcaggccagcgaatgccagacggttgaaagatttatcccctgcgccttcggtgtcgttagcgtaggttttatattcccactggccatagcctgtcaggtcgttcgtgatctgcgtttcgcctttgaaacccacctgtacataggtttcatcgccgtcgtcgcctgggttgtcggagaaggtatgacgcgcatcaaccttaccgtacaggtcaactttgttgccattcttgttatacatttccgccgcatttactgcgccagccattaataacgcgggtacgagaattgccagaacttttcttttcattatatattccctttaaatataaattgtctgaatatatgtaattaccctccgtaactacatggctgatactattctatggattattatttaggttcaaaaataaatgtaattaaagtggtaaaaatattacaaaatatttctttttatctctttatttttcatatgaattaattcattgaaaatatagcgggtaattattattaagtatttcgtaattctatttataaaggattttaattcgggtgtattataattcactcacttttgagcaacaggacaggatgatggaacttgcgcagtggcaacaccgttttgagcgctggctcgacgaaaatcattttactgatgatacggcgcacgatatcgcccattttcgccgcgtctggatgacggcgcagggtattatggctgacgaggatagcgatccgctggttgtgctgaccgcatgctacttccatgacattgtcagcctgccgaaaaatcacccggaacgtagccactcctcgaggctggcagcgcgaaaaacgcgcgagatcctcagtcgcgactttcctgattttccgccggatcgttatgcagccgttgagcatgctattgaagcgcacagcttcagtgccggtatcgcgccgcaaagcctggaggccaaaattgtgcaggatgccgaccggctggaggcgttaggcgctatcggcctggcgcgcgtctttgccgtctccggtgcgctgggcgccgcgctgtttgatgccgacgacccgttcgccggaacacgagagttggatgataaagccttcgcgctcgaccactttcagaccaaactcctgcgcctgcctgacaccatgcaaaccgcgcgggggcgcgaacttgcgcgtcacaatgccgattttctgatccagtttatggcgaagctgagtgccgaattacagggcgattacctcggaaccgacagccagatattgacccatttccgtcgcagtgtgcgatcctgaactgtggtactctgttttctgtctttattgtccggttaagagaatgcaggaaaatcgatcagtgactgtgcccgcgcctgagcgggttgagaaatcaacggcagccgtgcaggcactcctgcgtcagctgctggaaatgtatgatgctaaaacgctggcaaaccagctggtggcccatggcgagagccactggagcccggcgatactcaagcggctgctgataagcgacagggcagggcaccgcctgagcgacggtgagttccgctatctgcaaaatttgctgccgcgtcctcctgctgagcatccaaattatgcctttcgctttatcgatctctttgccggtatcggcggcattcgccatggctttgaagctattggcgggcagtgtgtattcaccagtgaatggaacaaacatgccgtccgtacctataaagccaactggtattgcgatcccgacgcgcaccagttcaacgcggatattcgggatgtcacgctgagccacaaaactggcgtcagcgatgaagaggccgccgaacacattcgcaataccattccggctcacgatgtgctgctggcgggctttccgtgtcagccgttctcgctggctggcgtgtcgaagaagaacgcgctgggacgcgcacacggctttgcctgcgatacgcagggcacactgttctttgatgttgcccggatcattgatgcccgccgcccggcaatttttgtgctggagaacgtcaagaatttaaagagtcatgacggcggcaaaaccttccgcattatcatgcaaacgctggatgaactgggttatgacgtggcggatgcagaggacatggggccggacgatccgaaaattatcgacggcaaacacttcctgccgcagcaccgcgaacgcatcgtgctggtgggcttccgccgcgatctcaatctgaaaggcgattttacgctgcgtgatttgccctcgctgtatccggcgcgccgcccgacggtggccgatctgctggagcccgccgtcgatgcgaaattcattctgaccccggtgctgtggaaatacctctatcgctatgccaaaaagcatcaggccaaaggcaatggctttgggtttggcatggtcaatccgcttaatcctgacagcgtgacgcgtacgctgtcggcgcgctattacaaagatggtgcggaaattcttatcgatcgcggctgggataaggcgctgggcgaaaaagattttgacgatccccagaaccaacagcaccgaccgcggcgcttaacgccgcgcgagtgcgcccgcttaatgggctttgagacgccgcagggctacagttttcgcatcccggtgtcggatacccaggcctatcgtcagtttggcaactcggtggtggtgccagcctttgccgcggtagctaaactgctggcctcacgcatcagcaaggccgttcagcttcgtcagagcgaggccgtcaatggcggacgttcacaataaggccacgcgcagtaaaaacatgcgtgccatcggcacgcgtgataccgcgattgaaaaacggatcgcgggccttctgaccgccgctnnnnnnnnnnnnnnnnnnnnnnnnnnnnnnnnnnnnnnnnnnnnnnnnnnnnnnnnnnnnnnnnnnnnnnnnnnnnnnnnnnnnnnnnnnnnnnnnnnnnnnnnnnnnnnnnnnnnnnnnnnnnnnnnnnnnnnnnnnnnnnnnnnnnnnnnnnnnnnnnnnnnnnnnnnnnnnnnnnnnnnnnnnnnnnnnnnnnnnnnnnnnnnnnnnnnnnnnnnnnnnnnnnnnnnnnnnnnnnnnnnnnnnnnnnnnnnnnnnnnncgtcatcgacgcgtaccagtgcatcatctttacccacggctgtttctggcatcatcacgactgctatctgtttaaagtcccggcgacacgcaccgacttctggctggagaagattggcaggaacgtcgagcgtgataaacgcgatgtttcgcagctttacgctcagggctggcgggtgctgattgtctgggagtgcgcgctgcgcggaagaatgaagctgaatgacgtggaactgacggagcggctggaagagtggatctgcggcggcggtcaggccgcgcagatcgatacccagggcattcacccgatcacggtttctccacctcacacctcgtgacaatcggtttcgcgggcagcaaatatttacccagcgtgaccagtaccacggcaaagacaatcacacccagcgccagccattcaatcgtcgacagcacttcgcccgcaaaaccggtacccagcagcacggcaaccaccgggttaacgtaggcgtagctggtggcaaccgccggtgagacgttgcggatcaggtacatataggcgttgatggcgataatcgagccaaacagcgccagatacccgacggccaggaaacctgaaaggtctggcatcgccgtcagtttttcacccgtcaacgcggaggccatcagcagcacaatgcccgccgcgagcatctcaatcgcacctgccatcatcccggagggcagctcgatgcgtgaaccgtagaccgagccgaaggcccagctcatggagccgatcatgatcagaacggcagcccaggggttcccgctcaggttaccgccgctgttcagcaggatgatacccacaagcccaatcgcgatgcccagccattcgagcttacgggtgcggatcccgaagaggcgactaaagcagagcgtaaacagcggcacggttgcgacgaccactgcggcgatgcccgacggcacgttctggtgttcggcgacggttaccgcgccattgcccaccgccagcagcagcaggccaatcagggcggcgttaagcaggggacgccgcggcggtagtctgtggccgcgcagcaataaaaacgccatcagcagcacgccggccgtaaggaaacgaataccggccatcatcagcgggggccagctttccacgcctatacgaatgacaaaataggtggacccccagatgatatacagggaaaagagtgctccaatgagcggtaataaatgccggaaacgcatagtccctcacgacgaaataaaaagttcgctcatagttaacgccaaaactatcagcctggcgagtgctttaattgtgttgttgatgtgaaatttttgttgacgcgaggtgccagtttccgggcggtgagttttgttccatactattcacttaattagcaaaaaagaaggaaagagattttggcaggaagtagcttattaacattactggacgacatcgccaccttgctggatgacatttcggttatgggaaaactggcggcgaaaaagaccgccggggtactgggagatgatttgtcgcttaacgcgcagcaggtcagcggcgtgcgggcgaaccgtgagttgccggtggtgtggggcgttgcgaaagggtcctttattaacaaggtgatcctcgttccgctggcgctgctgattagcgcctttataccctgggccattacgcccctgctgatgattggtggggcgttcctgtgcttcgagggtgccgaaaaagtgttgcatatgttcgctgcacgcaaagagaaagacaccccggaaatgcgccagcagcgtctggaagcgctggccgcgcaggatccaaaaacgttcgagcgtgataaggtcaaaggcgcgatccgcacggacttcatcctctcggccgagattgtggcgattacgctggggatcgtctcagatgcccctctgataaaccaggtgctgatcctgtccggcattgcgatcctcgtgacgataggggtttatggcctggtcgggctgatcgtcaagctggacgatatcggcttctggctggaaaaaaaatccagcgcaatagcgcgcggcatcgggaaaagcctgctggtgctggcgccgtggctgatgaaaaccttgtcggtggtgggaaccctggcaatgttcctggtcggcggcggaattatcgtgcacggtgttgcttcgctgcatcacatgattgaacattttgcgtcaggccagggagcggtagttgctgcgatcctgcccacactgcttaacctcgtgctgggctttatcgtcggtctgattgtggtagccgttgttaagctggttggaaaagtacgcgggaaatcgcattaattattgctgaccccgggtgcaaaaagaccattcctcgtctaaattgaaaacgtttcaccctgatacaggaggcaggtatggtctttttgatcagtgatgaagttaagcccaaaaatggtggtccaggtatgatcgtcaccgggtattccagcggaatggtggagtgtcggtggcatgatggatacggcattaagcgggaggcttttcgcgaagacgagcttcagcctgctaataaaaggcaaaaacgcgacaaggcttaatcacacaacgcccggccttgccgggcgtttttactggcagaagacttatcatatcggatggtgagcgacaatcagggagtgtgtgtgcagcacgatacctttgttgtaaaacaatcttttttgcagtggctgcataagcgttgcaatccccgtttgattgttaacttctgttttatcgttgtcctgatcttttccaccctcctgacctggcgcgaagttgtggtactggaagatgcttatatctccagccagcgtaaccatctggaaacggttgccagtgcgctggacagacagcttcagttcagcgtcgataagttattgttttttcgccacagcatgcgtgatgccctggaaacgccgctggcgtttggcgtgctgcatgatgcggtaaagcgttttgcgcatttgcgcacgtcccccagctggcaaattgcggttgataaacagcgcacgttaccgatcaacggtgtttcggatgccttcgttgaaaagacgacccttctgaaccgtgatgatgagtaccttaataatgaactgtccgccgcgcttgaagtgggatatttgctgcgtctggcatccagcccttcccgcaacgaagagcgcgtgatttatgtctctcgcgccggattctttctggaaacggatacgccgggaaattccagcgatatcgtgcagcgctattaccacctggtcactcagccctggtttacccaacagtccgagcgtgaaaaccgtgcgcgtgccgtgcgctggtttatctcgccgccttccacctttgtcggcaaaaagccgctgatcaccgccagcgtgccggtttattacaatcacgtctggtatggcgtggtggcgatggatttcacctttgccaccctgcgtcgcctgctggtggaagccgtgggcgataacccggaaggggaataccaactgtatgacagtcggcttacccagcttgcaacgtctgaatcaccggctgcggacgttaatcattttgacgcgcgcgaattagcgcagatagcgcacgcgatagaatcggattctgaaggcggcattcgcctggggagtcgttttgtcagctgggagcgtctcgaccattttgatggcatcgtcctgcgcgtgcacaccctggatgaaggggtgcgcggtgatttcggcagcatcagcattgtgctggcattgctttgggcgctgttcaccgcgatgctgctcatctcatggctggtgatccggcgcatgnnnnnnnnnnnnnnnnnnnnnnnnnnnnnnnnnnnnnnnnnnnnnnnnnnnnnnnnnnnnnnnnnnnnnnnnnnnnnnnnnnnnnnnnnnnnnnnnnnnnnnnnnnnnnnnnnnnnnnnnnnnnnnnnnnnnnnnnnnnnnnnnnnnnnnnnnnnnnnnnnnnnnnnnnnnnnnnnnnnnnnnnnnnnnnnnnnnnnnnnnnnnnnnnnnnnnnnnnnnnnnnnnnnnnnnnnnnnnnnnnnnnnnnnnnnnnnnnnnnnnnnnnnnnnnnnnnnnnnnnnnnnnnnnnnnnnnnnnnnnnnnnnnnnnnnnnnnnnnnnnnnnnnnnnnnnnnnnnnnnnnnnnnnnnnnnnnnnnnnnnnnnnnnnnnnnnnnnnnnnnnnnnnnnnnnnnnnnnnnnnnnnnnnnnnnnnnnnnnnnnnnnnnnnnnnnnnnnnnnnnnnnnnnnnnnnnnnnnnnnnnnnnnnnnnnnnnnnnnnnnnnnnnnnnnnnnnnnnnnnnnnnnnnnnnnnnnnnnnnnnnnnnnnnnnnnnnnnnnnnnnnnnnnnnnnnnnnnnnnnnnnnnnnnnnnnnnnnnnnnnnnnnnnnnnnnnnnnnnnnnnnnnnnnnnnnnnnnnnnnnnnnnnnnnnnnnnnnnnnnnnnnnnnnnnnnnnnnnnnnnnnnnnnnnnnnnnnnnnnnnnnnnnnnnnnnnnnnnnnnnnnnnnnnnnnnnnnnnnnnnnnnnnnnnnnnnnnnnnnnnnnnnnnnnnnnnnnnnnnnnnnnnnnnnnnnnnnnnnnnnnnnnnnnnnnnnnnnnnnnnnnnnnnnnnnnnnnnnnnnnnnnnnnnnnnnnnnnnnnnnnnnnnnnnnnnnnnnnnnnnnnnnnnnnnnnnnnnnnnnnnnnnnnnnnnnnnnnnnnnnnnnnnnnnnnnnnnnnnnnnnnnnnnnnnnnnnnnnnnnnnnnnnnnnnnnnnnnnnnnnnnnnnnnnnnnnnnnnnnnnnnnnnnnnnnnnnnnnnnnnnnnnnnnnnnnnnnnnnnnnnnnnnnnnnnnnnnnnnnnnnnnnnnnnnnnnnnnnnnnnnnnnnnncacttacgaaaatctgcaatccaccgccgatgcgcgtctgtatgaggcgaaacagcgcgggcgtaaccaggtcatctggcaggatcacgtcaaaaagtaatcaagcccctcgcaccagccggtcggcccggtgtgctgagtgtgataaacccgggcgggatcgttgttcttaaggctgataccctcccggttgaagcctttcaccacgacggcaaagcctacgctgtccagcagcggggcatcattggggccgtcgcccaggcccagcgtcgtcggttcggaaccctcgtgcaggcgatactggtccacaagccagtgaaccgccacgtctttgccgcagcaggtgtccaggatatgccagaagcgtgctccctggacaatcttcagcccctgccgggcgagttcggcggcaaagcgttccatttgttcatcactgtcacgccagatcagcgtcacggaagcctcgtgtttacgcgcaaacaccgagcggggacggctcagcccggtccattcggcgaccacgcgctcgtccacgtcatcgaaggtggtgaatttaagatgcatctcctggcgtacccgggcaatacactgccggatatcgtcatgcttcttttctgagatgaaccgtgcggcgttttcccaccgtacgtcaggctggatcaccgcgccgttttccgcaatatagggcaacccgccaagccccagctcctgctggatgtcatccatctcggacgcggttttgctgctacacagaatgaccggtacctgttcatccattaacttttccagccagggggccgcaggttgccagtcgagtgtgtgaaaatccaacagcgtgccgtcgaggtcggtaaaaacaagcagagtctcctcaaacgaaggcataacgtctcccgggtgatgatttcacctaagataaatcttaaaaaaagaggccttgacacgccattgaagtggaaacgatcccgacaaacccacacgcggcgcatgtttatactcataaccaaaattcacatgtataaaatataatattcgctaagagaatatatgcttgtaagactattccgttggggataatgtcttacctgcatcagatttcctggtgtaacgaatttacaagtgcttcttgcataagcaagtttgatcccggtcatccccatgaccgggatttttttcgccttagcggttcgtctccgagacgctaaagtcatggatatccagctcgaatgcttcagccagttcacggtaggtatggtaatccctaccattgaccacgacacggtcggaattatcctccgcgcgatgaacttcggactcactgatttcattgatggcggcaagcagggcatcgacatccacttcaacctcacgcttaatggtgtcgctgtactctttgtcggtcttcatggcgggttcctcatttaatcgtctcaacagttaagtatagaccgcacacaaaaacgccattcgcgccaggtggcgatgccaggcaatgtaatttgttctacactggctcaaaaccacaggaggaatgtatgaaggtcaacgatcgggtaaccgtcaaaacggacggtgggccgcgccgcccgggcgtggtgctggcaatagaagagtttaatgaaggcacaatgtatctggtgtcgctggaagattacccgctcggcatctggttcttcaacgaactggggcacccggatgggatctttgtggaaacggcggaatagggcggcgtcgggggcgtcttctccccggcgccggctactgaaaagcaaaatctctggccaggccagagatcaaggtagggtacaacatggccgtgcaaattagcgcatattaacgaaaatcccattcgtcacattatctgtcaggcgtacgacatggtatatgacttgcttattatgcgttttaattttccttttaatatttcctttgtgtgacgatactgtttttgccttgatattcatctggtctgagatctgaattgtcccttgtccagccatccacattcttagcatacttgattcagttctgcttaatgatagggtgggtatgttaaccgcccctacattcttaacttctttattcaaataatcgcccaggatatcatcaagcgactctggtttaatcgatttcgaactgattaataagtttttacgcaccaacaaatactcatcgaaatgaatattggcgatcgccataaaaacaataaacagggtcttaggatgctgattaatgatctgcttaatgtgctgactgttagcggggtcgtgaatgaaacagtcctcattaataaacaccacgccgggcttgtgggcgtcacaagcggctgcgagttcttcaacggtgtgtgcatcgttgatgtctctctttcttacccctctgcttgctaagtacccggttaaccctagccgggtgtagctgcataaatccataatgatcgttgacatggcataccctcactcaatgcgtaacgataattcaccacctgcctgagagctcataaacagccatacgggatggaaaaaatctaataaaacctgtgagcatgacaaagactttcaggcgaactcactatnnnnnnnnnnnnnnnnnnnnnnnnnnnnnnnnnnnnnnnnnnnnnnnnnnnnnnnnnnnnnnnnnnnnnnnnnnnnnnnnnnnnnnnnnnnnnnnnnnnnnnnnnnnnnnnnnnnnnnnnnnnnnnnnnnnnnnnnnnnnnnnnnnnnnnnnnnnnnnnnnnnnnnnnnnnnnnnnnnnnnnnnnnnnnnnnnnnnnnnnnnnnnnnnnnnnnnnnnnnnnnnnnnnnnnnnnnnnnnnnnnnnnnnnnnnnnnnnnnnnnnnnnnnnnnnnnnnnnnnnnnnnnnnnnnnnnnnnnnnnnnnnnnnnnnnnnnnnnnnnnnnnnnnnnnnnnnnnnnnnnnnnnnnnnnnnnnnnnnnnnnnnnnnnnnnnnnnnnnnnnnnnnnnnnnnnnnnnnnnnnnnnnnnnnnnnnnnnnnnnnnnnnnnnnnnnnnnnnnnnnnnnnnnnnnnnnnnnnnnnnnnnnnnnnnnnnnnnnnnnnnnnnnnnnnnnnnnnnnnnnnnnnnnnnnnnnnnnnnnnnnnnnnnnnnnnnnnnnnnnnnnnnnnnnnnnnnnnnnnnnnnnnnnnnnnnnnnnnnnnnnnnnnnnnnnnnnnnnnnnnnnnnnnnnnnnnnnnnnnnnnnnnnnnnnnnnnnnnnnnnnnnnnnnnnnnnnnnnnnnnnnnnnnnnnnnnnnnnnnnnnnnnnnnnnnnnnnnnnnnnnnnnnnnnnnnnnnnnnnnnnnnnnnnnnnnnnnnnnnnnnnnnnnnnnnnnnnnnnnnnnnnnnnnnnnnnnnnnnnnnnnnnnnnnnnnnnnnnnnnnnnnnnnnnnnnnnnnnnnnnnnnnnnnnnnnnnnnnnnnnnnnnnnnnnnnnnnnnnnnnnnnnnnnnnnnnnnnnnnnnnnnnnnnnnnnnnnnnnnnnnnnnnnnnnnnnnnnnnnnnnnnnnnnnnnnnnnnnnnnnnnnnnnnnnnnnnnnnnnnnnnnnnnnnnnnnnngcaggggcgcggcgacggcaatcgcgactttcatcgcctccgtgcccatcatcatgaccgactcaggtgtcattgcgcgctcctcaactgtagaaactctgcgccagcgagctgaccagcagctgccagccgtcgaccagcacgaacagcatgatcttaaagggcagggcaatggttgcgggcgggaccatcatcatccctagcgccatcaggacgctggcgatcaccaggtcaataatcaggaacggaatgaaaatggtgaagccgatctggaacgccgttttcagctcactggtcacatacgccgggagcagaatgcgcatcggcaccgcttccggcccctgtaactcaccggtgttagcgagacgggcaaacagggccagatccgcttcgcgcgtctggcgaagcataaattcacgtaatggctgcgcgcccttttccagggcaacctgcatggaaattttatcttcgctgaacggctggtaggcctcggtgtaaatcttgtcgatcaccggcgacataatgaaaaaggtcaggaacagggctaaacccagcagcacctgattaggcggcgcggacggcgtgccgagcgcgttgcgcagcaggccaaacacaatgatgatgcgggtgaagctggtcatcatcagcaggatcgccgggataaaggtcagcgaggtgatgaataccagcgtctgcacggacagggaccagctttgccccccgttcgccagcggcgtggaaaccagccccggcagttgcgcatacacagagggcgcgaacaggcccaggcctgtcagcgtaaggaataacaaacggcgcatcaggatctcccgggacgcttgagcaaactcttcattacggactggaaatccgcaggggcctgggcgttagcctccaccgtgacaggcgcaggggggagcgtgtgaaggacgttaatgctggaggcggtcacgcccagcaccagtcgtgcatcttccacctccacaatgaccacgcgttcgcgcggcccgagcggggtgctggcgctgaccttcaacccgcgggtaccggccgttttccccgccagaccgaaacgctttgccagccaggcggcgataaggataaaggcaataataccgaacagcgcgccgctcacctggagcagcggtgagccgggtacggcggagggcgcggacagtgttgcctgggttttcatacttaacgactcagacgacgcatgcgttcggaaggggtaatgatgtcggtgatacgtacgccgtatttatcggccaccaccactacttcgccctgtgcaatcaggtagccgttgatcagaatatccagcggctcacccgctaaaccgtcaagcgccaccacggaaccctgcgtcaggcgcagcagctctttaatggtcatgcgggtgcgacccagctcaacggtaagcttgaccggaatgtccataatcaggtcgatgtcctgcaacgtgccgctgacgtcgccgccgcctaactgctgaaagaccgcgtctgccgcgcttttcgtcggcgtcgttttctgctcgtttaacgcgtcagcccacagatcgtccagtgctccgctgttttcatcggacggattgttcatgtcactcatttgggctgttcctcattcagcgaattcaaaatcgggttgatcaagtgctcaacgcgtaacgcatactggccgttaatcgtgccgtactggcttgtcagcacgggtacgccatccacatgggcaataatgcggtcaggtttatctatcggcaaaacgtcgccgggttgtaatttcaggatctgcgataaccgcatggagatgtcggcgaagttggccaccagctccagctgcgaatgctgcacctgacgcaccaggttttcacgccagttctgatcttcgtgacgtgagttctccagcggcgggttcacaagcagttcgcgcagcggttcaatcatgctgaacggcaggcagatgttgaactcgcccgtcaggttgccgatctcgacgtggaacggggtgttcacgacgatgtcattcggggaggtggtgatgttggtaaacttcacctgcatctcggaacgcacgtactcgacttccagcgggttaatcgctttccacgcgtcgctgtaggattccagcgccagcttcagcatgcggttaatcacacgctgttcggtatgggtaaactcgcggccttccactttggtcgggaaacggccatcgccaccgaacaggttatccaccgcgatgaacaccaggcttggcgagaacacaaccaggccggtaccgcgcagcggtttcagatggatcaggttaaggttggttggcaccggcaggttgcgggcaaactcatgatacggctgaatgcggatcgcaccgacggtgatatccgggctacgacgcagcaggttaaacaaccccatacggaactgacgtgcgaaacgctcgttgatgatctccagcgcctgtaaacgctcgcgcaccacgcgacgctgggtattgggatcgtagggacgaatattatcgtcgccggtcagacccggtttcggttcgtcacttttatcgctgtcgccgttgagcagcgcatcgatttctgcctgagaaagaatactgtcgcccatgtcgttaccgcagaatgaaggctgtatacagaacgtcagtgacttcctgcttaggttggccgtttaccagcggggtcgccagcgtctgtttaatggcatcgaccagcttttgcttgcccacatcggtggcgagcgctgaggcatcctgacgagaaaacagcagcagcagacggctacgcacttctggcaggtagtcgttcagacgtgcacgggtcgcttcatctttcagacgcagcgtaatacccacgtaaagcacgcgatccgcatcgcccaggttcacggtgaacgtatccagcgggtagaagaccggtgccggtggaggcggcgcttcagctttggcggccgcgctggagggttcttgctgcatacgccagtaactgtagcctgcggtggcgcaggccgcgagggtaatcaacaccagcagcgggatccagatggaacgcttgctttttttggtgatagcggagtctgtcatctgatacgagcttcctgtttcggtacagcttaatacggtgattatcccgtgtccggcttaggtcaaagcgtggaaaagacggggataatcacgttacctctggcgtttaggcaaagatgtctacggcacggctgccgcgcgcggcggattgcagggcggcaggggcaggcaataactcttcactctcatcgttaaacccgccatgctggccggaacgcgaagtgtgctgttgctgcccggatgaggactgctgttgcccggcaaagccctcgctgctgacgctgctttgggaaagctgaatgccgttttccgcaagctgcgtgcgcaggatcggcagggccgcttccagcgccgcgcggacgtggctgtggggcgaaaccatctgcaactgcgcctggttgtcatccagcttaagcgaaatttgcacctgacccagatcctccgggtgcagacgcagctctgcggtctgctgtccctgctttgtgaacagggtgatgtgctggctcagattctgctgccattcgtgcgtgcccagcggctggcttaacaccggcgctgtcgcaacggtagcggcaggctgtgaaggcgccaggtgacttacgatcggcgccagcgtcgcggttgggccggcggcagacgacgccgcgctcgctacgtcctgcttctccgcgacggcggcgacggctggcgtaacggctgccgtgtcgggcagcgacgtgtcgctgtcctgaaccggcattatttcctgacccgttaacgcatggctaagcggctgatgctggccgttgtccgtctgggctagcgcagaggggagggcagctcgaggggcgatctccccggtgctcgcaggctgcgtcgctaccggggtggtggtctgctggtgcggtagcatcgccatcagcgcgcttaacccggccagctcctcttcttcagtcgtggtctcgctgtttgttttcgcctccggctgggtcagcgtcttcagcgcatccgtattcgctgcgggtttcaggccggagacgaggctttgcagggagacggcggtatcttcacctgtcagggtctcctgacgggagagcagttcggcgattttggcctggagcgtggtatcaccgtttttttcctttgccgctgtcgacagcttgttgcccgccgctttcagatccgccagcgtcagcggggcatctttgcctttgccggtggtctcggtcagcgcgcccgccagcagagagagaaaatcttgcgcgccctcagcgcctttcccggtcagcgtgccgccggacgggtcgctgtcggtcatcagcagttgtttcagtgtgatcattctggtttcctcattgatgcgcgctgggcaaactcatccatttttttctgatccagacggttttccgccagggtcgaggctgcaatctgccggtcctgtaaggtttgccaggcctgcaaccgctgttttttctcgcgccagaaattcagcgcggtatcgactttttgcgtccactggttaagctgctggcgatgctgctcaatcgccttttccagcgtctggataaactgctgatagttaatccagcgctggctaccaatgccctgcgccatgtcggtgttaaggttggtgcgatattcatgctgatagtcgattaacatcttcaactgttcttcagcctgctggcacccgcgccgcattgcgccaagctgcaatgcggcatcatcaacttctttttcagccagatctttcagcgttgataacgcgctggtctgcgccatgaccttcgccctccacctgtgttacacctgcgggaaaatcagctccagtgcctggagggaatcttcccagtcggcgcgttcaaaaataccctgttgcagaaatgcctccagctgcggccacagggcaatcgctttatcgagcatcgggtcgctgcctttggcgtacgccccgacgcttaccagatcgcggttgcgctggaagctggagagcagttgtttgaagttacgcacgcgggcgtagtgttgctcggtgatcaaggccgtcatcgcacggctgatcgaggcttcaatatcaattgccgggtagtgcccggcttcggccagacggcgcgacagcacgatatggccgtcgagaatcgctcgcgcggagtcggcaatcgggtcctgctggtcatcgccttcggtcagtaccgtatagaacgcggtgatggagcctccgccgctgatgccgttccccgcgcgctcaaccaacgccgggagcttggcgaagaccgacggcgggtagcctttggtcgcgggcggctcgccgatggccagcgcaatctcacgctgcgccatcgcgtagcgggtcagggagtccataatcagcagcacgtgctggccccggtcgcggaaatcttccgcaatacgcgtggcgtaggcggcaccctgcatacgcagtagcggcgacacgtccgcaggcgcggcgatcaccaccgagcgggcgcggccctccgcacccagaatgttttcgatgaaatctttgacttcgcgaccacgctcaccaatcaggccaaccacgataacgtccgcctgggtataacgcgccatcatgccgagcaggaccgatttacccacgccggagccggcaaacagccccatacgctggccgcgtcccacggtgagcagggcgttaatcggccgcacgccggtatccagtacgtgctcgattggcgtgcgttgcagcgggttgaagggttgggtgatcagcgcgccggtttcggtggtatcaggggagggcaggccatcgagcggtttgccgcttccgtccagcacgcggcccagcagcgccggaccgagcgggagctgtttgccgctttgnnnnnnnnnnnnnnnnnnnnnnnnnnnnnnnnnnnnnnnnnnnnnnnnnnnnnnnnnnnnnnnnnnnnnnnnnnnnnnnnnnnnnnnnnnnnnnnnnnnnnnnnnnnnnnnnnnnnnnnnnnnnnnnnnnnnnnnnnnnnnnnnnnnnnnnnnnnnnnnnnnnnnnnnnnnnnnnnnnnnnnnnnnnnnnnnnnnnnnnnnnnnnnnnnnnnnnnnnnnnnnnnnnnnnnnnnnnnnnnnnnnnnnnnnnnnnnnnnnnnnnnnnnnnnnnnnnnnnnnnnnnnnnnnnnnnnnnnnnnnnnnnnnnnnnnnnnnnnnnnnnnnnnnnnnnnnnnnnnnnnnnnnnnnnnnnnnnnnnnnnnnnnnnnnnnnnnnnnnnnnnnnnnnnnnnnnnnnnnnnnnnnnnnnnnnnnnnnnnnnnnnnnnnnnnnnnnnnnnnnnnnnnnnnnnnnnnnnnnnnnnnnnnnnnnnnnnnnnnnnnnnnnnnnnnnnnnnnnnnnnnnnnnnnnnnnnnnnnnnnnnnnnnnnnnnnnnnnnnnnnnnnnnnnnnnnnncagcgtgtgctgaaactcgctcaccagctgctgcatgcgggcatgcagcggcgcctgctgctggcgcgcctgctcaatgccctgttctaaacctttcgccagcccttcctgataaccctgtgcgtgcccggtctgacggccttcgttcatcccggcgttgaagccctgctcgtgcgcctgcatttgcatctgggccagcatctgggcgcgctgttcctcttcactcagctcggggatgcccgccccggcgtcgccctcgtcggacgacacaacggcaggggtgaactctgcggtgggaggggagaggtcgtcaggcgtccagcgcttccacgacagttcatcagacataggtgtcgtctccgctgccaatcaccatctcgccggtttctgccagacgacgaacaataagcaggatcgctttctgttcgttttccacctgagacaaacgcaccgggccacggttggccaggtcgtcgcgcaggatatcggccgcacgctgggacatgttgcgcaggaacttctcgcgcagcggctgctcggcgcctttgagggcgataagcagcgattcggagtccacctcctgaagcaggcgctggatgctgcgatcgtccacttcgaccaggttttcgaacaggaacatctcgtcgataattttctgcgccagctcgccgtcgaactcgcgtaccgccgtaataaccgcctcttcctgctgcgttttcatcaggttgatgatttccgctgccgttctcacgccgcccattttgctgcgcttgaggttctggccgtcgagcaggttgttcagcacttcggtcagctccgccagcgcggctggctggacgccgccgaaggtggcgatacgcagcattacgtcgtggcgcagacgctcgtcgaacagcgccagaatatcggccgcttggccccgtttgaggtggaccagaatggtggcgataatctgcgggtgctcgtcgcgaataagatcggcggcgctttgcggctccataaagttgagcgtttcgatcccgctggcggtgtcgcgcgtttcgagaatatcttccagcaggctggcggcgcgctcttcgcccagcgccttaaccagcacggagcgcaggtattcgttggcgttgacgttgagcgcggcaaactgctcggcttcctgctcaaactccgccagcacttctgtcagctgcttgttggagatctggcgcacgttggccatcgccgcgctgaggatctgcacttctcgctgggagaggtgtttaaacacctccgccgcacgatcttcgccaatggtcatcagcaggatgacgctcttatcggtgcctgtaagcgtattactcatgttcgttacccatccaaccgcggatgaccagcgcgacgacgcgcggatcgttatctgacatttcgcgaatgcgctggctcatcacctctgcgcccatacgctggttagcacggcgctgctgcatctgttcatctttgctgagacgaacttcaaccgcttcttcctcgtctggacgcgcgttcttctgttccagcgcggctttctcggcttcagcacggcgctgtagctgaggacgaacgcccttacgccacagcagccacgcgacaatcagcaccagcagccagcggcctgcggacattagctgatcgaagaacgcctgctgttgccagaacggcagttcgccaccggtctcatccaccgggttgaacggtgagttcacaacgttgagggtatcgccacgtttttcagagaagcccatcgcttcgcgggttaaatcttcgatctgcttcatctgctccgctgtgagcggcagcggtttaccgtccggcagcgttttgtagttcaccaccacggcaacagagagacgctgaatatcgcccgtgttcagtttggtatggcggatagtccggtcgacttcgtagttggtcgtttcgttacggctgctgttacgcgggccggtactgttcgcggtcgaggtcgtctgctgattcgtttgctgaccgttctgcgggtttgccggcggggtggagattggcgcggcgttggcaggcgctggctggttagagagcgcgcccggcacaccgccaggatactgtccgccgacctgttccgtctcattgatctgacgcgagcgtaacacggcgcgggaggcatccccgttcggagcgtactgctcttcggtctgttctttattcgagaaatcaatctgcgccgtgacctgcgcgtgtacgttgctgctgccgaccaccgggcccagaatcgcttcgatgcgacgctggagacggccttccacgtcggcggcgtatttcagctgggcgtcattgagatcgcgccctgcggtgttggactgtgtcagcagatgaccactctgatccaccagcgtaacgttacccggcggcaggccggccaccgcactggagaccaggtgcgtgacggcgctgatctgcccttcatccagcgcacggccaggttcgaggttaacggtcacagaggccgaaggggacttttgttcacggacaaacagggacggcttaggcatcgccaggtgcacgcgggcacttttcaccgggcctaaggtttcaatcgtacgggccagctcaccttccagtgcgcgctgatagttaacctgctcgctgaactgactgatgccgaatttttcctgatccagcagctcaaacccaaccgcgccgccttttggcagcccctgctgggcgagacgcaggcgaagctcgtgcactttatctgccggtacttcaagcgcaccgccgttatcggcaaagcgatacgggatgttcatctgggttaactgggtgacgatggcaccgccatcctggtcggaaaggttgctgtagagcgtgcggtaatccgggctttttgcccataagaccatcgcgacaacgatcgcaatggcggcagcgcctgccacaatcaacgggatcttagggttggcgcgaaggcggttcatccactcgagtgatttattctgtggcgctgtcgatgctgctgtcgcactcattgcgcacctcttaaatcctggtggtttacgttattcgtgtagagaaacaaaactgactcccgggtcggcaaacacgacaaaagttccatactgatggccctgccattatttgatgattcgggattttctatgcgtcaaataacctggttttttaacgctatttaccgccattatcttattgacaagctgttagtcttgacctcgtaaaaaaccatccaggggagagtcatggctatacagggcattgaaggggtactcagtcagttacaggcaacggcgatgaccgcacgtaatcagagcgtggctgaccagccgccgggcgttagcttcgccggtcaactgcatgcggcgctggaccggatcagcgacaagcaaaacgcggcccgtacccaggctgagagatttacccttggcgaacccggcgtggcgctcaacgatgtgatggccgatctgcaaaaagcgtcggtgtcattgcagatggggttgcaggtgcgtaacaagctggtgtcggcataccaggaagtgatgggcatgcaggtttaacgattttcagcctgatacagatgaacagaatttgcctggcggctttagcgcggtggtcccacctgaccccatgccgaactcagaagtgaaacgccgtagcgccgatggtagtgtggggtctccccatgtgagagtagggaactgccaggcatcaaacaagtgaagaggccatccgaaaggatggcctttttgcgtttgtttgctgaaaaacggcaggccgggtaaggcgaagccgtcacccggcaactcagagcgtactatccctgacaaacattcaaacgaagcaattgccgctgatggaaacgcccaaggatcagcaccgtcgttaacgcaccaagcagcgcgcaaaacatatctgactgggtatcccatggatcgccctgcgtccccagaaaatcatccgcaccctgtcccattgccaaagctgcccaccactcaatgagttcataggtggcgctaatggccagagcaacacagcacaccagaaatcccgtcatcttatgtccacgaacatacccaccgcgcagcagaatttctcgcgctgccagtgcgggaaccagcccctggaagaagtgaccgagcttgtcatacggatttcggctaagcccgagcatctcctgaacctcaaaaccaaccggaacctttgcataggtgtacataccaccaaccatcagaatgatggcgtggaagaaaatcaaggtatagagaaggggagtcagggggtatcgccggtgcgtggcaagcagaagtgggatgatgataatgacgggcgtcacctccatcagccaggtgatgcgatcgctcgtgaacaggccggtataaaacaggatcaacagcaggagcagtgacccgacttttaaagcagataaggtcatatcattttcattgtcaggggaaaaaatcactattacctgacagaagggaaaattcaatgcgtagcggatacagaaaagcaaaaacccagccgtaggctgggttctttaaatagtggtgcccggactcggaatcgaaccaaggacacggggattttcaatcccctgctctaccgactgagctatccgggcaacggagcgcattaaaccgcaatcgcgcgcgatcgtcaacattatttcgggaaaagctgttcaactgcttaagtttgcggcaatctgtccgtttgtgccctggaattgcacaaatcttccagacagttcaggcaagatgtgacaatgctgacggtaagaggagggcagtatggcaaacgactggcttgagctgcgtcagcatgcagaaacaggtattgagacaattaaggcgcatttcgaaggacatgcctttgatccccactggcatgatagctatctggtcggaataaccctttccggcacccagcagttccactgtcgccgtgaacgccaccgtagccagccgggcgatgcttttttacttgagcccggggagatccatgacggtgatgcaccgatagaggggggctttacttatctgaccttttatctggatgaacactggctcacccgtacgcttcaagggctgtacgactctactcccgggagctacaccctccactttgcccaaacgctgacgcgagagcctcagttggtgcgcgctatcggtgatacatttgcctcgttgcataacgatgagatgaagatcgtccaacagagcacaatggataacctgctctctcagatcactgcccactgccactggcgtaagaaactcccgttgcagttacaaagctccgccgtggcgcatcgtgcccgcgactatctctatgcgcatatcggcgagaacgtggggctgtcagaccttgcccgtgagacgggtacggaccgctttacgctcacccgctgttttaagcgcgaatttcacctggcaccgcacgcctggcttatccagctgcgcctggcaaaagcccgacagatgctggcgtgtggggaactgcctgtcgatgttgcaacggctgtggggtttgccgatcaaagccatcttggtcgctggttccagcgggcataccgtatttctccggcacactaccgtcggttgtgcacaaaccttccagacgtttccagaaaataacggcacattcgtggctctaataaaaaaggagtcacctgtgaatttattacccttcctgctgtttgcatttgtcgcctcgattacaccggggccaaccaatattctggtactggctaacagtcagcactttggcgtaaaaaatacggttcctgcgatcctgggcgggtgtattgccgccagcgctattgttctggtttcaggtgctggggcaggagaagtgttacgccagtatccgctgatacgtcaggtaatgagctgggcgggcgtgctgtggctttcctggatgagctggcagctgtttagcgccccggccgcgaatctctcctccagacgccatgtccggtttaccgcgcgggcggcggcgttattacaggttgtaaacccaaaaacgtggatgatggcgctggcagttgtcagcctgtttgctccggcaagcgaccatgcatttcgggatgttgcgctgatggcgctagggtttctggcgatctccgtggcttgtttgttgtgctgggcgtggctggggaaggcggtgaaccggattttccgcaccaccgtggcgatggtgcgatttcagcgcgcgatggcgctgtgcttgtttatttccgcctggacgggaatgctggcttaggtcagagcaccacccatacgacactgcgcaaaccgcaaaatatcttccgccagacggtgcgctgtatccacatccgcctggctacggttcaccagcatgcggctcaggcaaccttccagcaccagctccatctgcttcgcgaccattgccgggtcatccacttcaagcgtggtcagcagctcgtgtgtgaactcgtgcgcggcacgtttttgctgatctgccagttgatggatggggtgcccgggatccggatagtaggtgcaggcggcgataaacagacagcctgggtaacggttgttggttacacactccgtcagtgcggtatagcgcgccagcagcttttgctcggtggtcagctcttcattcagcatcagctgcctgcgccagatatccacctgctggctgagatagcgcagggcatcatacagcagcgcctctttatccggccagaagcgcttaagttcatccagagggtaatcgatacggtcggcgaccatctcaagcgtggtgctggcgatcccttgaatctcaagcaattgcagggcttgtcccagtacgtcttcgcgttgcacggttatctcctccgctattcccaacggtttgtcccgtctaaagtgttgtttacggttggcgattgcgcaaatgcgcgttgaatgccgtcgcgtccataaacccggttacacgctgcgtcagctgttcttccccctgttcattgaagaacaggatggtaggcagcccgagcacattaagttgcttcagtagagccttatcctgcgcgctgttggcggtaacgttcgcctggagcagaacggtatcgctcagcgcatgttgtacctgcggatcgctgaaggtgtatttttcaaactctttgcaggccacgcaccagtcggcgtagagatcgagcatgaccggtttgcctttcgcctgcgccagggcgcggttaaggtcatccacgttcttaatctgtataaaattcagatgagcctgcgtttgacctgccggggtgccaaacgcccagtcctgtagtggacggacgctcaccagcgcggccgccagcagaaggatctgtagcaggcgcatccacggtttcttcgcccccagactcacgataaacgcccaactgaagaaggccacgccgagcatcgcccacagacgtgtaccccacacatcaccaatgatgcgctccagcaggaataccggtagcgccagaatgacaaaaccaaacgtggttttcaccgtctccatccacagtccgctcttcggcagcagacgattgccaaacaccgtcaccaggatcagcggcaggcccatgccgagcgcgtagaggtacagcgtgccgccgccgagccacaggttgccgctctgggcaatgtataacaggatggcgctcagcggcgcggtggtgcagggggagcaaatcagcccggcgatggcacccatggcgaacacgccgcccgcagagccaccctgctgacggttgctcatcagcgtcagacgggtttgcagggaagagggcagttgcagggtgaacaggccaaacatcgacagcgccagcagaataaacaccgctgacagaccgataagcacataagggtgctgaagggcggcctggaactgcaacccggcagcggcgaccacgaggccgagcgccgtataggttaacgccatgccctgcacatagataaaggccagcaacagcgcgcgggcggtggaaaggcgttgtttaccgcccagcacgatgccagagataagcgggtacatgggcagcacgcagggcgtaaaggcgatgccgataccaatcaataacgcccaaagcgctgagaacggaaggtctgaagcggctttgccttcacccctcaccctggccctctcccctgggnnnnnnnnnnnnnnnnnnnnnnnnnnnnnnnnnnnnnnnnnnnnnnnnnnnnnnnnnnnnnnnnnnnnnnnnnnnnnnnnnnnnnnnnnnnnnnnnnnnnnnnnnnnnnnnnnnnnnnnnnnnnnnnnnnnnnnnnnnnnnnnnnnnnnnnnnnnnnnnnnnnnnnnnnnnnnnnnnnnnnnnnnnnnnnnnnnnnnnnnnnnnnnnnnnnnnnnnnnnnnnnnnnnnnnnnnnnnnnnnnnnnnnnnnnnnnnnnnnnnnnnnnnnnnnnnnnnnnnnnnnnnnnnnnnnnnnnnnnnnnnnnnnnnnnnnnnnnnnnnnnnnnnnnnnnnnnnnnnnnnnnnnnnnnnnnnnnnnnnnnnnnnnnnnnnnnnnnnnnnnnnnnnnnnnnnnnnnnnnnnnnnnnnnnnnnnnnnnnnnnnnnnnnnnnnnnnnnnnnnnnnnnnnnnnnnnnnnnnnnnnnnnnnnnnnnnnnnnnnnnnnnnnnnnnnnnnnnnnnnnnnnnnnnnnnnnnnnnnnnnnnnnnnnnnnnnnnnnnngccgtctttcacttcgctaagcggaacgacctttgtttcaggtgggtaacagaatccggcgtcggcgcagccctgataggtgaccgttaatgtggcgcctttatccgcctgattcaccgtgacgggcacgcttaagcgctggcgataaatttcactcttaccgtagaactcatcctcgtgccactcgccagcgggcatctgcaatgcgccgacgttcgcctttgccggcgtgatgctgacctgcttgcgatagaggtagtaaccctctttcacctgccaggtgagactgagatcgtgctggttttgctgaaagtcgaaaacgaacgcctggtcggcaggaataaagttcgaacggccgggtgcgtcaaacaacccggcaaaagctgacgtgctgcacagcagcaggatcagcgtaatgaagcgttgagccatgagagataatcgttatcgccgtggaccactggcaaaaccagcagctccggggtttggtatggatgatgagacttgaggcagtcgaggagcgcctgctggtttgtcaggttggttttgagcaacatctggacttcgtactcttgctccagcttgccttcccagtaataaagggaggtggcgccgggaagaagtgtgacacaggcagccagtttttcggccaacactttggcggccagatcctgggcagaagcttcatcaggggcggtgcacagtacaacaacagcatcaggcgtgttcacaagtcgacctcctcatcacgaaagtcttcactatatcacgcaaggcggttggtcattaatgaaacgggccgcagagcggcccgattttaactatttttacaacggctaatcgtttacagcacaatgccgccgatgataaagccgaggatcacgcagagcgtaatcgccaccacgcccgggatcaggaacgcgtggttaaacacgtatttaccaatacgggttgagccggtgtcatccatctcaaccgcggccagcagggttgggtaggtgggcagaacgaacagggcggaaaccgctgcaaaagaggcaatcgccgtcagcggcgtcacgcccagcattagtgccgcaggcatcagcgctttggtggtcgcagcctgggagtacagcaacgtcgcggcaaagaacagcactaccgccagcagccacggatagttgtgcagcaggtcgcctgcaacggtctggatatcgctaatgtgcgctttcacaaaggtatcaccgagccacgccacgcccagcacgcacacgcaggcgctcatgccggatttgaaggtgctggcgttcagcacttcgctggtgtcgattttacaggtgatgctgatcagcgtcgcgatggtcagcataaataccacaatggcttcgttacgcggcagaaccgggttctggatcagacctaccgtatcgctgatggcggtcgcgtagaacatcacggcgacgataccaatcaggaacagcagcacggagcgttttgcatgcggcttcagctcgaagacctgactaccgcgcaggctcacttcaccttttgccagacgctcctggtaaaccggatcgtctttcagctcggcgccaaggaagttacacagtacggcagtgatcattaccgcaatcagcgtgaccggaatacagattgccagcagcgtcaggtaacttacgcccatcggctcaaggatacccgcgaagaagaccaccgccgcggaaatgggcgaggcggtaatcgcaatctgggaggcgaccacggcaatagaaagagggcgagacgggcgaataccctgttctttcgccacttcggtgattaccggcagcgtggagaaagcggtatggccagtaccggcgagaatggtcataaaccaggtcaccagcggggcaaggaaggtgatgtatttcggatggcgacgcagcattcgctccgccaggctcaccaggtagtccatgccgcctgcgacctgcatagccgcgatagcagcaataaccgccatgatgatttcgataacgtcaaaagggattgcgccgggtttaatctgaaagatcagggtaagtacaagcaccccgagaccgccggcaaaaccgatgccgatacccccgagtcgtgcgcccaaataaatcgccaacaggacgatgacgagttctgctccaaacataaagacctgccttgctcattaacaagttgatattgaattgttgtgttttggtaacgcccataaagaaaaaaggcacgtcacaagtgacgtgcctttcggaagcttagcctgaacggttactgttcgctttcatcggtatatcgtttcgctttatatgccgggtgcatcaggttctgggcggagaagatatcgtccagttcggcttcggtcaacaatcctcgctcgagaaccacctcacgcacgctcttaccggtttcggcacaaatcttcccgacgatatcgccgttgtggtggccgatgaacgggttgaggtaggtgacgatgccgatggagttatagacgtagccttcacacacttctttattcgcggtgatgccgttgatgcatttttccagcaggttgtagcaggcgttggtcagaatatggatagattcaaacatcgcctggccaatcaccggctccatcacgttcaactggagctgaccggcttccgaggccatggtgacggtcgtatcgttaccaataaccttgaagcaaacctggttcaccacctctggcaccaccgggttcactttagctggcatgatggatgaacccgcctgcaactctggcaggttgatttcattcaggccagcgcgcggaccggaggagagcaggcgcaggtcgttacagattttggacagtttcaccgccagacgtttcagtgcgctgtgcaccatcacgtaggcgccgcagtctgaggtagcttcaatcaggtcttccgcaggcacaaccggcaagttggacacttcagccagcttctgtaccgccagctgctgatagccatctggcgtgttcaggcgtgtaccgatggcggttgcgcccaggttcacttccagcagcagttcggacgtgcgcagcaggtttttggtctcttcattcagcagcacgttaaacgcgtggaattcctgtccgagggtcattggcaccgcgtcctgcaactgggtacggcccattttcaggatgtcctggaactcaacggctttacgctggaagccatcgcccagctgattaatcgcgtcgaccagtttgacgatagaggcatacaccgcgatgcggaagccggttgggtaggcgtcgttggtggactgacatttgttaacgtggtcgttcgggttcaggtactggtattcacctttctgatgacccatcagctccaggccgatgtttgccagcacttcgttggtgttcatgttgacggaggtgcccgcgccgccctgatagacgtcgaccgggaactgatccatgcatttgccgttgttcagcacctcatcgcacgcggcgataatcgcatttgcagcgcttttaggaatggtttgcagctctttgttcgccagagccgcggctttttttaccatcaccataccacgcacaaattcagggatgtcgctgattttgctgttgctgatgtagaagttttcaatcgctctcagagtgtgaacaccatagtaggcatccgctggaacttccctggtacccaacaaatcttcttcgatacgaatgttgtttaacatgtgaaccttcttttcaagctgccgatggattgtactaaacacacagtatatatgtggttttgaatattttatgaccgacgattattccctcaatcggccagatgttcgagatcatatgctgatgatagcgaattgccgtaagctggatcacttattatcgacccgatttcatgataattattaatctgtgaaatatgtcaccgctttaatatttccagaaaaaatatccgtgcaaaccgattgaattttggctaaccgtcaccatttcttatctacgcgcttcgcgaacacattcagtcaggggcctgaaggcacctgccacacaggagatgccagtgcgctggataccatttattgctttctttctttatgtttacattgagatttcgattttcatccaggttgcccatgtgctgggcgtcctgctgacgctgattctggtgatcttcacctccgtcatcggcatgtcgctggtgcgcaatcagggtttcaaaaatttcctgttaatgcagcagaagatggccgcaggcgaaagcccggcagccgagatgatcaaaagcgtgtcgctgattattgctggcctgctgctgatcctgcctggtttcttcaccgacttcctcggcctgctgttgctgttgccgccggtgcagaagcatctgaccatgaagctgctgccgcacctgcgtttcagccgtatgccaggcggtggtttcagcaccggcccgggggatacctttgaaggggaatatcagcgtaaggatgagcagcgcgaccggttagatcataaagacgatcggtgagtttgtggcccggtggcgctcgctcaccgggcctgcggcttttgccgcttcggtaaaaacacccacagccccgccagcatgacgatggcgtacacactcttccatcccaccatcgccagcagcatcaggcacaggacacacccgacagccgccagcgccttaaagcgtcctttcagcaaccgacagcccgccagcatgcacagcaggtagatcatgatgaaaataccgttggcgtagacaatcagcgcgtcaaggttgatgtcgaggagataaatggccagggaactcaccacgcagcagcccagtacggtattcagcgcattcaccggaagctgacgctttgacaggcgtgagagggggctatccggtttataaagtgcctgagaccacaccagccgggcgaagctctgaatatagatgttgaggctggcaaagcaggcgagatagccaatcacgcaggctacccacagggccttaacgccaaacagctgcaccacgatgcccggcagcgacgcggcggcagctttctcttcaccgaacgcgttgaagtgcagcaccagtacggtacaggcccagtacacggtacccgccagcagcaggccaatcatcagggcgcgggggaaatcacgctcgggctgtttaaactcggatgccagatgagcgaacgcctccagaccgacgaaacaccagaacatgacggatagtgcagcgaaaagctgtgcgtggtcgatgtcgttaatcgcggggaaaggaatatccgccacggtaatgtcacccgcaaaccagatggcgacgatcagcgcgacaattaacacggcgaccagcgtttgcagattggcgctggagctggccccgcgtgagcctacccaccagacaatcgccagcgtaccgagttcagccagcagcagctgttcatcgtgccagccaaacagcgcctgtccgaagccggttgcgatatgcagggctgccggaaggccaacgggtatcaccgacaaaaatagccagccggtgacgcgctccatccgcggcccaaacgccatgccgacaaaatgcgctacgccgcctgcgctcgggaagtgccgcccgagtatggcaaagacaatcgccaccggaaacaccagcacgatcagcaccggccatgcccaaagactgttattgccggcaaccaatgccgccagcgcgggaaccgcaaatacccccgtgcctaataaagacgttgagagtaagccaatgccctgcgccagccccaactcctgcctgggtccactcatttacctcgtcccgcgaccatcaaaagagagtggatggtaacactttcgcaaatttttttcgattaccccttgaaggggtaaaaagctatccccatctctcagggcactagccggaaaaccgcatgcggaccggcgtcatccataactgataatgactttctcaaaggagagctatcaatgagtattcgtccgttacatgatcgtgtgatcgtcaaacgtaaagaagttgaaaccaagtctgctggcggcatcgttctgaccggttcagcagcagcaaaatcaacgcgtggcgaaatcatcgctgtcggtaagggccgcatcctggaaaacggaactgtgcagccactggacgttaaagttggtgacatcgtcattttcaacgatggctacggcgtgaaatccgagaagatcgacaatgaagaagtgttgatcatgtccgagagcgacattctggcaattgttgaagcgtaattaacgcacgaaactgtacgaatttgaggaaataagaacatggcagctaaagacgtaaaattcggtaacgacgctcgtgtaaaaatgctccgcggcgtaaacgtactggcagacgcagtgaaagtcactctgggcccgaaaggccgtaacgtagtgctggacaaatccttcggcgcgccaaccatcaccaaagatggtgtttctgttgcacgtgaaatcgagctggaagacaagttcgaaaacatgggcgcacagatggtgaaagaagttgcctctaaagcgaacgacgctgccggtgacggcaccaccaccgcgaccgtactggcgcaggcgatcatcaccgaaggcctgaaagccgttgctgcgggcatgaacccaatggatctgaaacgtggtatcgacaaagctgtcgcctctgctgttgaagaactgaaagcgctgtccgtaccgtgctctgactctaaagccattgctcaggttggtactatctccgctaactccgacgaaaccgtaggtaaactgatcgctgaagcgatggataaagtcggtaaagaaggcgtgatcaccgttgaagacggtactggtctggaagacgaactggacgtggttgaaggtatgcagttcgaccgcggttacctgtctccatacttcatcaacaagccagaaactggcgctgttgagctggaaagcccgttcatcctgctggctgacaagaaaatctccaacatccgcgaaatgctgccagtgctggaagccgttgcgaaagcaggcaagccgctggtaatcattgctgaagacgttgaaggcgaagcgctggcgactctggtggttaacaccatgcgtggcatcgtgaaagtggcagcggttaaagcacctggcttcggcgatcgtcgtaaagcgatgcttcaggatatcgctaccctgactggcggtaccgtgatctccgaagagatcggtatggagctggaaaaagcgaccctggaagacctgggccaggcgaaacgcgttgtgatcaacaaagacaccaccaccatcatcgacggtgtgggtgaagaagctgctattcagggccgtgttggtcagatccgtaagcagatcgaagaagcaacttccgattacgaccgtgaaaaactccaggagcgcgtagcgaaactggcaggcggcgtagcggtaatcaaagtcggtgcggctaccgaagttgaaatgaaagagaagaaagcacgcgttgacgatgccctgcacgcgacccgtgctgcggtagaagaaggcgtggttgctggtggtggtgtcgcgctggtgcgtgtagccgctaaactggctggcctgactgctcagaacgaagaccagaacgtgggtatcaaagttgcgctgcgcgcgatggaagctcctctgcgtcagatcgtgtccaacgccggtgaagagccgtctgtggttgcgaacaacgtgaaagcgggtgaaggtaactacggttacaacgcggcaactgaagaatacggcaacatgatcgacttcggtatcctggatccaactaaagtgacccgttctgcactgcaatacgcggcatctgtagctggtctgatgatcacgaccgagtgcatggtgaccgacctgcctaaaggcgacgcgcctgacttaggtgctgctggtggtatgggcggcatgggtggcatgggcggcatgatgtaatcatgctgttctgaacctctcagaacgaaccccgggcagcaatgcccggggttttttattgtcttctactcaaacgtgcctttcacgcacaccacgccttcacgcaccatctggcggcctttcgcccagacctcacggatcttcaggtcatccgtcagcaccaggaaatcggcatcgcatccgggcgcgatccgccctttatgctccagaccgagaaactccgccacgttacgcgtaaatggcagaagcgcctcctccagcggcaggtgatatcggccgaccagctgctgtagcgtctcaagcagggactcaaaacccgccacgccaatgccaacaagattaccgtttgcgtcaaaattcggctggctgccgttgccatccgagctgagcgtgagccggttaaacggcacctgcgcgtcacgggccgtcgcgatggcggtagcggcatcaatgggctcactgatgctggtggtgatgtcgatgtaccccccttcgcgggcatagtccagtgcggcgtggaacagtgcctgggcgcggttgacgtgggttggcagcagcttcgtgcggggcacgtcggcgttattcaggatgttaagcagtggctccagccgtttcgggctgttgccgaggtgaaacacggatatccccgctttggcgcccagcagcccgccgacgcgtgactgggcggccatattcgcgagctggtcatctgccggagcggaagagcgatggtcggaaatcgcgcatttcacgccaatgattttatcaatcagcgccacatccttttcgatactgccggtaatcgtcggagaaggcaggccatacgcgcctgtcagcatccacgtgctgatcccttcatgctcaagcgcccgcgttttcgccagcagcgactcgggatggcgggtcacgccgtcggtgcccagcaggccaacaacggaggtgatgccagccgccaccagcgcagacaatcgcacctctggcgtccgggtgtggggaccggcttcaccgccgccgccaatcaggtgtacatgctgatcgataaaccccggacaaaccaccgctccggcgagatcgctttcaggacagtctggcctcgttgtggcgtggcccgctttttcgactgcgacgatttttcctccggcaatcagcagatcgcaatgcccaagatcctcgggagcgtaaagctgcgcattgcggaaaaggtgcggttccagcactgaaaaatccatttttatctcctcagaagagtagctgcatcacccacattgagagcagggcgttaatgacgcagatagtgatgatgtgcggataatacttcgggttgacgcctgcggtgccaaggcaacggcccgtgttttgcaccggattacccatcagatagatggcgggcagcaggatggtggcatcgtgaccgttgagcgtgccggcagcgaccagactggcgcagacccccacaccgccgcccatgctcattaccgaggccagaagaaccgttgccgccgcacccggaagcccccacagggccatgatgggctcgcataccctgccgacaatatccagcaggccggttaccttgagcgcctgaatgatgacaaacgccatgaccacgttcggcagcaggctggtggtggcgatggtaaagccgcggcgggcgccatcgataaacaggtccatgatatttttacgcggctgggcgatcatctttcctcctgaacgcggcgaacttccatgtgggcgatccacagtcgcaggaagttcgcgccaacaaatttgaacaccagaatgacggcaagcggcgtgatcaccgggacggtaataaaggtaaagagtgcggcaccagaagaaaaatagttggtaataatggcgctaccgctggtctggaaggtggcgaaaatggcgcgttcatggtcagtaatcgccccttcgtcagtcaactctttggtcatccctgcggctgcatcggtattttgcaggttggcgataagcgccagagagcagatgcccggcacgccgagcagcgggcgcagaatgggcgtcatgagctgttgtgcggcgcgcagcccgcccagcccctcggtaacggcaatgatcccgagcgataaaatgaccgagggcgccagttcaagggcaaacaaaaacccatctttcgctcctgtgccgccctcaccgcgaaacgttagcgcgccgttcaccggtccaaagctgccgttcagcacggtaaaatccagcacgcgccaccattcggtacttttggcgaaaaaacctgagaaaaatacgatggtgagcacgaacgccagatagcccacccaggttactttttcctctcctgaggatgatgcactcatgaaacccccttttttgagtcgcgtacaaaagttgtacgtcgcatcactaaaaacgatcgggggctaaaacacgatatcccaaaggttattatcagaattcatttaagatgtcggaggagtgcgagcggaatctggctcgcagaaatgctcagcatttttcttttggtcatctttttagtataaggtttacacgcggacaactactgtccagcttattgaaaacgaggaataacatgcgcataaaagtctgtgcagggattgtaggtgcagcattgctgctggcgggttgtagcaccagcaatgagctgacggcagcgggccagagcgttcgctttgtggaagataagccgggcagcgaatgccagctgttaggcaccgccactggcgagcaaagcaactggatgtcggggcagcacggcgaagagggcggctctatgcgcggtgcggccaatgccctgcgtaatcaggctgcggcaatgggcggcaatgtgatttacggggtgagcagcccgacgcaggggatgctgtccagctttgtgccaaccgccagccagatgaacggccaggtctataagtgcccgaactgatataactttttgatggcgctgccgctttatctccagggcaggtaagcgtagcgctacctgcctttttactgctgccgcagctgcaaatccagcggcgtcttactcggctctccgccaatctcacgtgccagcttcggcaccatataacccgaaaccagcgttaacagctcgcgcataatcttccgggcctcttcatctgtcaccatgaagtgcgccgcgccctggacgcgatccagaacatgcaggtaatagggcattacgcccgcatcaaataaggcattgctgagatcggccagcacgcgggcgctgtcgttcacgccgcgcagtaatacgctctggttgagcagcgtcacgcctgcctttcgcatacgcgccatcgccgcacgaaagtccgcgtcaatttcatttgcgtggttgatatggttcaccagcagcacctgcaaacgggactgctccaggcgcgtgaccagggcgtcggtgatacgcgccgggatgacgatcggtaaacggctgtgaatgcgcagacgcttaatgtgcgggatggtctcaagctgagtcagcagccagtccagctcatgatcttttgccatcagcgggtcgccgccggaaaagatgatttcatccagctccgggtgcgccgcgatgtagtccagtgccacctgccagttgcgtttattgccctgattttcggcgtacgggaagtggcgacggaagcaatagcggcaatttaccgcgcaaccgcccttaaccagcagcagggcgcgattacggtatttatgcagcaaacccggtacgacactgttttgctcttccagcggatcggtgctgtatccgggggcggtaataaactcatcctgagaggtaagcgtctgttttaataatggatcaccagggttacccttttccattcgggcaacaaacgcgcggggaacgcgcagggcgaaaaggcgcttcgcctcacgacctgcacgcaacgcttcgtgctgttcgaggtctaaaagacgcagcaattcatcaggactggtgattacatcggcaagttgcgataaccaatcttctctggacggggtgtttagggttacaatatgcgccattttgtggcttagctaccagttaacaaatttagagggccttatggcaacgtactatagcaacgattttcgtgctggtcttaaaatcatgatggacggcgaaccgtacgcggttgaagccagcgaattcgttaaaccaggtaaaggccaggcattcgcacgcgttaagctgcgccgcctgctgaccggtacccgtgttgagaaaaccttcaaatctactgactccgctgaaggcgctgatgttgtcgatatgaacctgacttacctgtacaacgacggtgagttctggcacttcatgaacaacgaaaccttcgagcagctgtctgcggacgcgaaagcgattggcgacaacgccaagtggctgctggatcaggctgagtgcatcgttaccctgtggaacggtcagcctatcgcggttacgcctccgaacttcgttgagctggaaatcgttgaaaccgatccaggtctgaaaggtgataccgcaggtactggcggcaagcctgccaccctgtctaccggcgcggtggttaaagtgccactgttcgtacagatcggtgaagtgatcaaagtggatacccgctccggcgaatacgtatcccgcgtgaagtaatttacgtcatgattaaaggcgcagcgcccgctgcgcctgattttgcaggcagggaagatgaaacgtaccgttaaaattctgcttctgttagcgttctccagcgcaattctctccggttgcaacaccgcgcgtggcgtgggcgaagatattcaggatctcggccatatcatttcccatgcggccagctaattccgtttaattttcctaaaaattcttccttttccgtcaaacgacaagatcttgtctattcttaagttgctatacacaaaataactttggctataaaaggaagatattatggttaagaaaacaattgcagcgatcttttctgttctggtgctttcttcggtactgactgcatgtaacaccacccgtggcgtaggggaagatatctccgacggtggtaacgcgatttctggcgcagcaactaaagctcagaactaatgaaagcgacggtacggcagctaacttcaccgtaccgtcaattctccacttcctgtagcgataaaaacggggagtaacgcgtatccatatgaagcttcatgcggatattgcgtttgtacgtatacaccgtttttccgttaatgcgcagattgctggcaattttctggttgctcgcaccatccatccacagggtcagtactctctcttcctgacgcgtcagtaacggtgccgccatttccggaagctccgcgcttgcgcatgtcgttagcgcgtcgtttatcaccgccgccagtttttccagatcggtatttttggaaagtgaagaccatatcgggaactgcgccagataatctgtcatctcctgctcctgccccgattgcagcataataaaaggcaatgtttcgctggcaataagcagggaagatagctgctgaaaatggtgtaaatcctgccggaagcccgataaatcagcgatgaccagcgcaggtttccattgcaggatatgctctctggcgaggaaaagattatttaccccggttacgacgaaatgacccgaaaacaggtctgaatgattgagccaggcttcaaatcccgtgcgggtgaagtgacaacggtcaatcaaaagaattttgaacatataattttcgcagtcggctagtggtttggcttcctgccatcagaaagcctatcatcatagagaagtcggatgagtcataaatgcctgaactccgtgccttactgaggctatttcttgccttaacgtgttcagcagaaaaagtttgaaaaaaaattccatgctaaccaaaatataaggcgcaacctcagccttgcgggacgacccgtaagcgcttcattcatcggggacggccccaacttgtcgttaagttaaggagcctgatatgtcctggatcgttcttgttattgccggtttgctcgaagtggtatgggcaattggcctgaaatatacccacggttttacccgcctgacgcccagcgtcatcactatcgccgcaatgattgtcagtatcgtcatgctgtcatgggcgatgcgaaccttgccagtcggaacggcttacgctgtctggactggaattggcgcggtaggggctgccattaccggcattctgctgctgggggagtctgcgagtctggcgcgcatcgccagcctcgcgttaatcgtcgcgggtatcatcgggttaaaactcagtacgcactaatgcagctgttttacccagattaatttcgtcacgtcaaacccttgccgggtcgctatgtccagcatctgctgtttcatttccgtcgagatcgttggcgtgcgggagaggagccacagatagttgcgatccggcccacacaccagcgcatggcggtactctctgtccagcgcaatgacgttatacccgccgtagaatgggccgatgaaagagactttcatggccgcgcggttagacgcgccggtgaaataggcctgaccaactgactgctgccacatctggcgatccgggttatagccgcggttaatgacccggatcccgccgtcatccatcgcgctgtagctgaccgtgactttttctaagccccgttcgaactgatggtccattcgggcgatttcataccaggtgccgaggaagcgctgtgcgtcgaaattactgactaccgtgacgccaggcggaggagtaggggaactgcaagcaaccactaaaaacgcggctgttactgcggcaataacaggcagaatgcgcataggagtttccttactgttttttgttaagtgtagatgacagcaaggaaaatgcgggagattgtgcagggtgttttgccgggtggcggcttcgccttacccggcctacaaagttcacgtattgtgtaggccgggtaagcgcagcgccacccggcaatgttttactgtagcgcctcgaggatatggtatgccgcctcaacgcgtgccgggttcggatagcttgtattcgcgagcatcacaataccgatctgcttttcaggaataaaggccacgtagctgccaaacccgccagtagagcccgttttatggacccaggacgctttgaccgggggagccggtggattcacttctaccacgggcaacggcgccagcgctaccttactgtcgctgccctcgaccaccgtgttggcctccacgggccagttgagcatctcccagcccagaccctgatacattgacccgatacgccagtagcgcgactgcgccagcgcgatgccctgcttaagtgaggcatcagcaacgttctccggcgccatgtttgccatgacccagttcgccatatcctgcacgttggttttcacgccataggcttgtgcatccagcatacccggcgaaacgcgcaccgctttaccgtcacgatagccccaggcgtaatgcgcctcttccgctttcggcacgttaatccaggtatggtccagcttgagcggcttaaggacccgcgtcgtcatggcctgctcatagggcatgccagaaggtttgaccaccagcgcaccaaaaagaccgatgctggcgttggcgtaaagacgcgttgtgccaggcttccactgcggctgccagttttgataaaagcgcagcagggaggcgttatccgtgacctcatccggtacctgtagcggcaggccgccagcggtgtaggtggcgagatccagcatacgaataccctgccactgcttgcccgtcagctgtggccagtatctggtcaccggatcgtccagcgaaatttcaccgcgagcaatggcatccccacctaaaacgccggtgaaggttttacttatagaacccagctcgaacagggtctgaggcgtaacgggtttattcgccgcgatatcggccttgccaaacgtgtaatagtgcggttttccctgataaataacggccaccgccatgcctggaacagactgggctttcatcagcggggtaaccgtattcgcgaccacctccgccagctgtttttctgacactggcgtggcgagagcagagcaagagatgccgagcagcagggcgcagcaaagggattttttcatcatcagtaatcttccgtaatagcgagtcaagggggatgtccgggcccgtcagacaggcgtagtctgttggatttgacagtgcctgacaaacggttaaatttagcattagctgttaatttttctaacggaagcgaccatgacgcgaagctatctacccctcaattcgcttcgggcttttgaggccgccgcaagacatctcagctttacgcatgcggccattgaactgaacgtgacgcattcggctattagccagcatgtgaaaacgctggagcagcacctgaactgtcagctgttcgttcgcgtgtcgcgcgggctgatgttgactaccgagggcgaaaatttactgccggtgctgaatgattcgttcgatcgtatagccggaatgctggatcgcttcgctaaccatcgtgcgcaggagaagctgaaaatcggcgtggtgggtacgtttgccaccggggtcttattctcgcagctggaggattttcgccgtggctacccacacatcgatcttcagctttccacccataacaaccgcgttgatccggctgccgaagggcttgactatacgatccgctacggtggcggggcgtggcacggtaccgaggctgaatttctttgtcatgcgccgctcgcgccgctgtgtacgcctgatattgccgccagtctgcacagtccggccgacatcctcaggtttacgctgctgcgctcctaccgacgcgacgagtggaccgcgtggatgcaggcggccggcgagcatcccccttcgccaacgcaccgcgtgatggtatttgattcgtccgtgaccatgctggaggccgctcaggcaggggtgggtattgctattgcgcctgtcgatatgtttacccatctgttagccagcgagcgcattgtgcagccctttgcgacgcagattgagctcggcagttactggctgacccgattgcagtccagggcagaaacgccagccatgcgcgaattttcccggtggctggtggagaagatgaaaaagtaaaaagcccgccggatggcgggcctgttcagtcagatggtgaccacggcaatcaacgtgacgaccgtcagaatggtcgccagaccgtagaagacccatttaccgcttggcacatggattttcagatcgtgcatcgcatggtggatacggtgcagaccacaccacagcggcaggacgatcatcaggaagatgaacacgcggccaataaagctgctcgcaaaggccagtacgcgctcatagctcagcgcatcgcccgggaacagccccagcggcagcatgatcccgaccagcaggataatgaccggggcaataatggcgctccacatgccgcctgcgccaaacagcccccagaagaccggctcgtctgaacgttttggatttggattgatcacagtagtctccttaccagaacagtgcgacaaacagaatgaccacagagacaactgccgtcactgcccagagccctttaatgaccggctctggccccattttttcgccttttacaatgatgttcgctgcttttggcgccagttcaaaccaggttttggtatgaagcagcgcggcggcgagcacaatcaggttcagcacaacgatgattgggttttgcaggaagcccacaaaactggcccaggcttccgggccgtgcttgagggcataaaccccgtacagcagttcgaggctgaaccagaccgcgggaacagccgtgccttcacgcagcatatagaagcgataaaacggcagttttttccaccaggtggacggcattggccgcacgtaggctttgcgtttagtcgtcatcatgcactccttagcgtggtttcagggtagcgataagaaagtctttcgagctttccactttcccctgctgaatagcggcggccgggtcgacgtgcttcggacacacttcggagcagtagcccacgaatgtgcaggtccagaccccgttctggctgttaagctgcgccatacgttcttttttaccgtggtcccggctgtcttcgttatagcggtgcgccagggtaatggcggccgggccgatgaactcagggttcaggccaaactgcggacaggcggcgtagcacaggccgcagttgatgcagccggagaactgatggtatttcgccatctgcgcgggcgtctgggtgtttggcccctgatccggcgtgcgcgggttgccgatgatgtacggcttaatcgcttcgaggctttcgataaagtgggtcatgtcgaccaccagatcgcgctcaatcgggaagttgcccagcgcttcaaccttgatacctttggtgtaatcacgcaggaaggttttacacgccagctttggcaccttgttgaccatcatgccgcaggagccgcaaattgccatgcggcaggaccagcggtagctcaggtctggggccaggttatctttgatatagccgagcgcatccagcagggaggtttgctcgtcgtaagggacttcatagaaagcgctgtgcggcgcggcgtccacttccggattgtagcgcaccacttcaattttcagtttttgcatctcagccattcgccttctccttcttatcggcggcttctgcttctgcaccgtacacgcgtttcgccggtggcagcgtggtgattttcacgtcgctgtagtccagtcgcgtagtgccatccgcatcgcgccaggcgagagtgtgtttaaggaaattgacgtcgtcacgttcggtgcagccctcatccaggcgctggtgcgcgccgcgggactctttacgcgccagggcggaatgggccatacattctgcgacgttcaggccgtggcccagttcaatggtataaagcagatcggtattgaagacgctggaggtgtcggtgatgcgcacgcgtttgaagcgctcctgcaactcggccagcttgtcgacggttttctgcatcagctctggcgtacggtagatcccgcagccttcttccatcgacagccccatttcgtcgcggatcttcgaccagttttcgttaccttcctggttcaccaggtctttcaggcgtttttcgacgtctgcaacctgcgcatccagcgccgcgctgttagcttcacctgccgttgcggcacgctccatcgcacgttcgcccgccatgcgaccaaagaccaccagctcagccagcgagttcgagcccagacggtttgcgccgtgcagaccgacggaggaacactcgcccaccgcaaacagccctttgatgcgggtttcgcactgctggtcggtttcgataccgcccatggtgtagtgcgcggttggacgcaccgggatcggctctttcaccggatcgacgcccacataggctttcgccagctcgcagataaacggcagacgctccagcagtttcttctcgccgagatgacgcaggtcgagatgcaccacgtcgccgcgcggcgttgagatggtgttgcctttgcgccactcgtgccagaaagcctgagaaactttgtcgcgtgggccgagttccatgtatttgtttttcggctcgccaagcggggtttccggacccatgccgtaatcctgcaaatagcgatagccgtttttgttgaccagaataccgccttcaccgcggcagccttccgtcatcagtatgccggagcccggcaggccggttgggtgatactggacgaactccatatcacgcagcgggacgccgtggctgagcgccatgcccataccgtcaccggtgacgatgccgccgttggtgttgtagcggtatacgcgacccgcaccgcccgttgccatcaccaccgcattcgcgcggatctggacaagcgtgccttccatcatgttcatcgccaccagtccgcgcgcatgaccgtcgtcgaccagaatgtcgagaacgaaatgttcgtcaaagcgctggatttgtgggaactggagggaggtctggaacagggtgtgcagcatgtggaagccggtcttatcggcggcaaaccaggtgcgttcgatcttcatgccaccgaagcggcggacgttgacgctcccgtccggacggcggctccacgggcatccccactgttccagctgggtcatttccgttgggcaatggtgcacgaagtaatcaacgacatcctgttcgcaaagccagtcgccccctgcaaccgtgtcgtggaaatggtattcgaagctgtcatgatcctgcgcgacggcggcggatcctccttctgcggctaccgtgtggctgcgcatcggatagacttttgaaatcaatgcgattttagcgttcggattggcttgtgccgcagcaattgcagcgcgtaatccagccccgccagcgcctattacggcaagatcggcttgaaaagtttgcacgacattcctccagatttttgttttcccgcaacgggatgaactaaaggacgttcacctgcccgaacgggcgattgcggaagcgattccactgctcctttatgggtaaaacagtataaccgcgtagaagtgagggaaatttgacgtgttcgatttttttgctgttctgtgcggtgatttatcatcgtgattaatgaatggcgtcacagtatttctctgtgnnnnnnnnnnnnnnnnnnnnnnnnnnnnnnnnnnnnnnnnnnnnnnnnnnnnnnnnnnnnnnnnnnnnnnnnnnnnnnnnnnnnnnnnnnnnnnnnnnnnnnnnnnnnnnnnnnnnnnnnnnnnnnnnnnnnnnnnnnnnnnnnnnnnnnnnnnnnnnnnnnnnnnnnnnnnnnnnnnnnnnnnnnnnnnnnnnnnnnnnnnnnnnnnnnnnnnnnnnnnnnnnnnnnnnnnnnnnnnnnnnnnnnnnnnnnnnnnnnnnnnnnnnnnnnnnnnnnnnnnnnnnnnnnnnnnnnnnnnnnnnnnnnnnnnnnnnnnnnnnnnnnnnnnnnnnnnnnnnnnnnnnnnnnnnnnnnaaaatttgtctctgccccggcttacgagtagacttcgtgcccttgtctgaaaacggagaaataactcatgagcgaaacggccacctggcagccgagcgcatccattccaaacctgctaaagcgcgcagcaattatggcggagatccgccgtttctttgccgaccgcggcgtcctggaggtggaaacgccgtgcatgagtcaggcgacggtcacggatattcatctggtcccgtttgaaacccgttttgttggcccaggccactctcagggcatgaatctgtatctgatgaccagcccggaataccatatgaagcgtctgctggcggccgggtgtggtccggtctatcagctgtgccgtagcttccgtaatgaagagatgggccgacaccataatccggaattcaccatgctggagtggtaccgcccgcactacgacatgtatcgtctgatgaacgaagttgacgatctgctgcaacaggtgctggattgcgcggaagctgaaacgctctcctatcagcaggccttccagcgccatctggaaatcgatccactgtcggctgataaaacacagctgcgtgaagtagcggcaaaactggatctgagcaacgtggcggataacgaagaggatcgcgacacgctgctgcaactgctgttcacctttggtgttgaaccgcagattggcaaagatcgtccgacgtttgtctatcacttcccggccagccaggcctcactggcgcagatcagcaccgaagatcaccgcgtggcggagcgttttgaggtgtatttcaaaggcatcgagctggcgaacggtttccacgagctgaccgacgcgcgcgaacagcagcagcgtttcgagcaggataaccgcaagcgcaacgcgcgcggtctgccgcagcagccgattgatactcatctgctggaagcgcttaaagccggtctgccggactgctccggcgtggcgctgggtgtggatcgcctggtcatgctggcgctgggtgccgagcacctgggcgatgtgattgcctttacggtcgatcgcgcctgaaaaaatgccgggtggcgctgcgcttacccggcctactcggtcatttaactctgccacattaaaaactgctcatttctctctatacgggtctttttcttaatttgactcggatagccacattgtttgtctggtcatctgctaccatccgcgcagtttaattccgtttcggatggttatatgtctcactcactcaaaaaaatgacccttaccgggctcattctgatgatttttacgtcagtctttggctttgccaatagcccgtccgcgttttatctgatgggctacagcgcgacgccgttttatatcgtttccgctctgttcttctttatcccgtttgcgctgatgatggcggagatgggctcggcgtaccggaaagaagaaggcggcatctattcgtggatgaacaacagcgtcggcccccgttacgcgtttatcggtacgttcatgtggttttcatcctacgtcgtctggatggtcagcacggcggccaaggtttgggtgccgttctcaacgtttctcttcggtgcggataaaacgcaggtctggtctctggcggggctgagctccacgcaggtggtcggtattctggcagtgtgctggatggtggtggtcaccctggtggcctcgaaaggcatcaacaaaattgcccgtatcactgccgttggcggtatttccgtgatgtgcctgaacctggtgctgctgctggtcagcatcgctattctgtgcctgaacggcgggcatttcgcacaggaagtcaacttcgtttcatcgcctaatccgggttaccagtccgggctggccatgctctcctttgtggtgtttgccatctttgcttacggtggaattgaagccgtgggcgggctggtcgacaaaaccgaaaatccggaaaagaacttcgctaaaggcattatctttgccgccatcgtcatttccattggctactcactggcgattttcctctggggcgtcagcaccaactggcagcagatgttaagtaataacaccaccaacctcggcaacattacctacgtgctgatgaaaagcctgggggtgacgctgggcaacgccatggatctcgcgccggaaacgtcggccaccctggggatctggtttgcgcggattactggcttgtcgatgttcctcgcctatactggcgcattcttcacgctgatctactcgccgctgaaagcgattattcaggggacgccaaaggcgctgtggcccgcacgtatgacgcagctgaacgctgccggtatgcctgccaacgcgatgtggatgcagtgcctgctggtgtgcgtgttcattctgctggtgtccttcggcggtgataccgcgtcggcgttctataacaagctgaccctgatggcgaacgtatcgatgacgcttccgtatctgttcctgaccctggcgttcccgttctttaaggcgaagcgggatctggagcggccgtttgtgatcttcaaaacccgcgcggcgacgctgctggcgaccactgttgtggtgctggtcgtcgcgttcgccaacatctttaccgtcattcagcccgtggttgaggcaaatgactggaacagcacgctgtggatggttggcggaccgatcttcttctcgctgctggcaatggggatttatgagcattaccgtcgtcgctcgacggcctgtgtagcagaagtggcgtaaaggattgaccccctcccgacggggagggggaaaggattacaaacttcccgccgggcgcgtacgcgccgctgacgtcaacgttcttcccgtcttacgtccgtccagcgtttccagacgcatctggaacggtgggaacggcatatcaattccgtgctcgcggaagccagccagaatcaactggtggatctcatggcgcagcggcatacggtgtcccatctcggcggcgtagatacgcagctcgaaaatctggatcccctgctgcaaatcaaccaggaacacttccggcggcgggttgtcgattaccagcgaacagcgttcagcagccgtatagaggatctgcgtcacctcttcgctgttggcatccgacggagcgggtacggtcagcaccacacgcgtgacggagtcggacagcgaccagttgataaactgctcggtgataaacgccttgttcgggacgatgatctctttacggtcccagtcgctgatggtggtggcgcgggtgttgatcctggtgacgctgccggtgagatcgcggatggtcaccgtatcgccaattcgaatcggcttttcaaacagaatgatcagaccagagacgaagttggcaaaaatctcctgtaaaccaaaacccaggcctacggtcagggcggcaaccagccattgcagttttgaccattcgataccaatcatcgagaagccaaccagcccaccaaacagcatgattaaatacttggtgatggtggtgatcgcatagcctgtgccgggggttaaatccagatgctgcaacagcgccagctccagcagggcagggaagttacggatcagctgcgtggtgatgatcagcaccagaatcgcaatcagcacggcccctaaggtgatgggctccaggctttcgaccccctgcaccgtggacgtcacatcccataaagagatgttctccaggaagccaaacgcggagtggatttccgaccacaggaagatcaccgacagcagggcaaccagcatcagaattgagcgtaccagccgcagggactgggtactgatcgcatccagatccagttcgacgtcatcggcgtctgtggtcccttcggtgctgttgacgtggttcggctcttcttcaccccgcgcgcgctgggccagaatttctgcgcgacggtgtttggcacggtcaaacgccagacgacgacgctggatcagcatgccgcggcgaataacatggtagaccaccagcagcaggaaccagatagccaccgacgtttccagtcgggcgagcagcgcctgcgccgtggcgagataaccgaccgctgccgccagcatcgccgccagcggcgcgctgagcagcaggttccacagcagacggttaaacatgttatcgccactgccggtcttgtcgagatagagcgggatcccggcgcgtttcaggctgagcgtcactaccgctaacgccccgcagatcagcataaagcacagccgtcccagcgagccggagaactcccggtcattgagattatcgaacatgatcaacgccataatcagcggcacaatcagcccgatactcatcaggtagtaacgcatcgcccgcgcaacgcgattacgcggccagccaaagtgagcgatgaacagaccatttggccgcgcaaacgtggcgcaaatcatcaccacccacagcagcggaacggtggcggtcacgccatcgccaatcgcgacggcaagcgggtagggccaggcttcacgcaggccgtatccgagcgtcatccacagcaccggcagcggagacgcgaccagaattgaccagaacaccgtacgcaacgtcagccagaagtgatcctgggttacttttcccactcgggcgctggagcgctcaaggaaacgggtaaagtgacgacgggaataaatactgaagcccaccagaatcagcgcccccagcagcgggaagatggtctccttgctggttatcatcattacgctggcgaggcccagctggctgaaggtgtccaatgaaatgaggcggcgcagatcctgcacaatctcaatcggccaggcgaaggtcatcggccgcacgtcggacgtccagaaaaggtaacggtgcgtggcttcgttgacctctttcagcgcatcctccagctggctattcgagactttcagcttagtcagctcaaggatcagcgtatcgcctccctgcaacagggaattgagcagttcgcgctgggtgcgcagttgcgcttccagaatacgactttgctcgccggtgagcggctgtccgtcagcctgacggatctggcggatttgcggctgcttgttgaggagatcttcataatgaagacgctgaacgcgcagctgcgccatctccgtatcaagctgctgcggttttggcatctctggcagacgagccacctgcgcgcgtaacgcttcgcccaacaggttagacgagccaagccactgggactgttcacgcagcgtgttgagcgcctgacgaacctggagggtttgattggtggcctgacgctgctgcgaggccaccaaatccatgcgctgcgcctgctgattcagcgcggcagaaagctcgcggttaaccttaaactgggcgacgatgctgtcgggcaggttagcactgttttcggccagtaactcggtgctttccagcgcacgttcagcttcacgctgacgctggctgttgagttgatttctcagcgcctggagatacgcatccagctgctggctctgcttctgcgccagctcggaacgcatccgcgacagctcctggcggttgttagcggaaagctgcgccagctccagttcatcaaccagcgcttttagtctggcggattccgcctgcaacccaagattttgtgcctgattctgcggtgtgctgcctgtctgcgtcccgatgcgacgttccacctcatttaactgacggcgggcatcggtttgctgctgtggaagctggctgagggaatcggcaatttcacgcgcccgttcctgctcctgctgcgccagacggcttttttccagcagttggctgctgacttgcaggatctcctgattcagcgcctcggacgtcatccccgcggggaccttgcgtggttcatcgcgcaggttgtttagctgcgagcgcagggtctgagaaagtttggggaagttgtcgataacctgctgatactgctgtgcgcgctcaagggaaccctttcgttcctcaagcgcgttcagtgcagactggagcgactcaacggtctccggctgagcgggtttcgccgcttttgcctgctccagctcctgggttatctgtttggcgtcgggggccgtcgctgcgtacgcccccatgctgaggcaccaggccatcagtaatacgataatcgggcgcacgtcagcgatccttctgttgttagccttcgtcttttttgtcgtcaaccagcgggctggcgtcgtgctcggctttgatctcttcttccggcaacggggcaggcgcaacctctggcgtcacaaagacctccgtcgatactgccagaggctggccgagtttggtcacggacaggctttccagctcgtcgaccaggttaactttgcccggtgcgaacaggttgatgaccgttgagcccagcttgaagcggcccatttcctgacctttcagcagggccacagaaccttcttcttcgccggcaggccaggtccagcgcttgatcacgccttcgcgcggcggcgtaatggtgcccgcccagacggtttcgatgctgcctacaatggtagcacccaccagaatctgcgccattgggccaaactcagtatcaaacaggcagatgacgcgctcgttacgggcaaacaggttaggaacgttttgcgccgtcaggtggtttacagagaacagatcccccggcacgtagatcatctcgcgcagaataccattacacggcatatgcacgcggtggtagtcgcgcggggagagataggtggtcgcgaaagtcccgttgcggaacagatcggccattatgtagttaccggccagcagcgcttccaggctgtagttatggcctttcgcctgcaaaattttgtcgtcttcaattttacccagctggctgatcacgccgtccgctggcatcaccagcacgttcgggtcggtattcagcgggcgcacttcgtcgcgcagcggacgcacaaaaaattcgttgaaggtgcggtagcttgccgtatccggcttctgcgcttctttcatgtcgaccttgtagtatttcacgaacaggtcgatgaccagtttggtcagccagcccgctcgtttgctcgcgccccagcccgccaggcgagtgagccacagtttcggcagaatgtattgaagcgaaagtttaaatgagtttaacaaggtagcctccaggccattgttttgtcgttcctgatccggcattacgctgccggaacctgaaaaaaggggacgattttagcgacgcttagcttagttgtcagttatcagaatcagaaaagtttttacgcgtttttacctggtccatgctttcgagaatacggtgataattttcgaaacgggtttccgcaatttctccgttctctaccgcttcgcggatagcgcagcccggatcgttgtcatgtttacagtcgcggtatttgcaagcgcctaaatagtcatggaattcgacaaatccgttaaagatttgttccggctcgaggtgccagagaccaaattcacgcacgcccggggagtcaatcacatcgccgccgtgcgggaagtgatagagacgtgaggcggtggtggtgtgctgacccaggcccgagacgtcagacacatcgttggtcaggatctcctgctgaaggccgagcaggttgttaagcaggctcgatttacctacgccggactgccccgcaaagatgctgatgcggtcggtcagcgcatcttctaacggcttcaggccatctttggtgcggctggaaaccatcaacacgcgatagccaatgttgcggtaaatatccatctgctcatttacaaaggccatggcctcgtcatccagcagatcgattttattcagcacgatgagcggctcaacctgtagcgtttcgcaggccaccagataacggtcaataatattgagcgaaagctcaggcaaaatcgctgaaacgatcactatctggttgatgttggcggcaataggcttcacgccgtcgtagaaatccggacgggtcagaaccgacgtgcgttcatgcacggcttcaacgatacctttaaccgttaccccttccgccgcctctttgcctggacgccagaccacgcggtcaccggtcaccagggaacggatggtgcgacggatattgcaacggtggatatccccgtcggcggattcgacatcggcgtgcatgccgaagcggctaatcacaacgccttctgtcgcttcgccaaacaggttgtcgtcgtaatcgggcttctccgtagtggttttaagacggcgctggtgatttgcattcacgcggcgctgctgccctttggagagtttatttttactcaatcgcgctggctcctggtcgcccgtagcgggcaaaacctctatgatacactctaattaatactagttaacctgctactgccggttatgcgagaagggtggaaaataacatgagcgcggacgaaaacaacctgatttggatcgatctggagatgaccggcctggatcccgagcgcgatcgcattattgagatcgccacactggtcaccgatgccaatctcaatattctggcggaaggcccaacgattgccgtgcaccagtccgatgaccagcttgcgctgatggatgagtggaacgtgcgtactcataccggcagcgggctggtggaacgcgtgaaggccagctccctgggcgaccgcgaagcggagctggcgacgcttgaatttctgaagcagtgggtgccggcaggaaaatcgcctatctgtggcaacagcattggtcaggatcgtcgtttcctgtttaagtacatgccggagctggagtcctacttccactaccgctatctggatgtgagcaccctgaaagagctggcccgccgctggaaaccggaaattctcgacggctttacaaagcaggggacgcaccaggcgatggacgacatccgtgagtctgttgcggagctggcgtactatcgcgaaaactttattaagctctgattttgcgatccggcgccttgcgtggccgggtttttgtcgctaaattgttcagcttgccgattaaataagcacttgaactgaatttcaaaaaaatcgctttgaggggggttgcagctaaacggatttctcgtataatgcgcctcccgtaacgacagagaattacacgttacgacagcaacaaaagcagtacagatttnnnnnnnnnnnnnnnnnnnnnnnnnnnnnnnnnnnnnnnnnnnnnnnnnnnnnnnnnnnnnnnnnnnnnnnnnnnnnnnnnnnnnnnnnnnnnnnnnnnnnnnnnnnnnnnnnnnnnnnnnnnnnnnnnnnnnnnnnnnnnnnnnnnnnnnnnnnnnnnnnnnnnnnnnnnnnnnnnnnnnnnnnnnnnnnnnnnnnnnnnnnnnnnnnnnnnnnnnnnnnnnnnnnnnnnnnnnnnnnnnnnnnnnnnnnnnnnnnnnnnnnnnnnnnnnnnnnnnnnnnnnnnnnnnnnnnnnnnnnnnnnnnnnnnnnnnnnnnnnnnnnnnnnnnnnnnnnnnnnnnnnnnnnnnnnnnnnnnnnnnnnnnnnnnnnnnnnnnnnnnnnnnnnnnnnnnnnnnnnnnnnnnnnnnnnnnnnnnnnnnnnnnnnnnnnnnnnnnnnnnnnnnnnnnnnnnnnnnnnnnnnnnnnnnnnnnnnnnnnnnnnnnnnnnnnnnnnnnnnnnnnnnnnnnnnnncttcttcatctccagattatccacagcgaagtgcttcgttggggacgttttctattatgtctgaaatactcttgtgaacagagttatccacagaaaccgtgttaaaaccagtctgtacgaaatgttagcagggtgaataatatcttcgtaattccctgtaatttatgaagaaaatttgatttcaaaatgttattgagatcacttgacctgtttgccagagctgatggcgcctgaattcttatttttattcacagcctgtgaatatatcacacatcccgcggcagccctttttcaatcaccctgaccaggcgctgtttcttcggtaactgcacttcaaccacgccggcatttcgcttctcaatttgctgcgcaatcgcccattctatgtgctcatcaagaagtgggtgctcacctctacggctttcgagcgcctgaagatttgcttcatcccacggggcattccccagcgcaacggccacattacgcagccagcgcaggtggccgatacgacgtatggcggaaccttccgtaaccttcaggaaccaggcttcgctccaggcgaacagttcgatcaactgcggggcatgtaacgccttgcgcggactgaagtcttcttcgtccgtcaactgtgaataacggttccacggacaaatcagctgacagtcatcacagccgtagatgcggttgccgataagcggacgaaattcctctggaatggcgccttccagctcgatagtgagataagagatacagcggcgcgcatcaacggtatacggttcgacaatagcgcccgttgggcagatggtcatacaggccacacagcgaccacagccttcttccaccggaccgtctaccggcaggggtaaatcaatcagcagttcacccaggaaaaagaatgagcccgcgtcgcggcttaagataagtgagtgcttacctgtccagccgagcccggctttttcagcgatcgggcgctcaagaataggcgcagaatcgacaaagggtctaaaattcagcgaaacacagtgctgctgaatggtttccccgagcttttttagacggttgcgcagaagtttatggtagtcacgtcccagagcgtatcggctgacgtaacccagcgaaggattttttagcgtgcgcgcaaaggccgcgttagcaggcagatagttcatgcgtacgctaataacgcgcagcgtacccggcaacagctcgtgggggcgggcacgcatcataccgtgacgcgccatccactccatctcgccgtggtattgtttatccagccatgcctggagcttaggctcgctggcagagaggtcggtgtcagtaataccgaccttctggaagcccagttcagcaccccactgttttattttttgcgctaattcattgagatcgaggggctgtgacatgacggaccatactgtgaagaaaaaccccgcaagtataccacattccatctggcatgcggatgacctccgtcgggccgagaaagaggccgcagatagcctgggcattaccctttacgaactgatgcagcgcgcgggcgaggcggcgtttaacgtggcgcgtacggcttatccggaggcttcgcactatctgatcctgtgcgggcacggcaataacggtggcgatggttttgtggtggctcgtcttgcggtggcggcggggctgcgcgtcaccctgctggcgctggagagcgacaagccgttaccggaagaagcgggcatggcgagagaggcctggctgaatgcggggggcattattcatgcgcctgatatcgtctggcccgaggatgtcgacgtgattgttgacggtctgctggggacgggactgatgcgcgcgcctcgcgatgacgtcgccgcgctgattacgcgcgctaatgcgcaccccgccccggtggtagcgctggatattccctccggcctgatggcgcaaaccggcgtgacgccgggcgtgtcgattgaggcggcgcgcaccgtgacctttatcgccctgaagccgggtttactgaccggtaaagcgcgggatgtcgtgggcacgttacaccacaacgccctggggctggaaaactggctggccggacaggatacccacatcacacgctttgatgcctccctgcttgcacagtggctgccgccgcgccgtcccacgtcccataagggcgaccatggccgactgctgattatcggcggcgatcgcggcacggcaggtgcgattcgtatgaccggagaggccgcgttgcgcagcggcgccggattaatacgcgtgctgacccgcagcgaaaacatcccgcccattattaccgcgcggccggagctgatggtccacgagcttaccccgcaggcgattgaagagggtcttgagtgggcggacgtggtggtcattggtccgggcctgggtcagcaggagtggggtaaacaggccctgcaaaaggccgagaattttcgtaaaccgatgctctgggatgccgacgcgcttaaccttctggcaataaacccggataagcgtcacaatcgcattctgacgccgcatcccggcgaagccgcacggctgcttaactgtagcgtggcagaaattgaaagcgatcgcttactttcagcccaacgtctggtaaaacgttacggaggtgttgccgttttgaaaggggcggggaccgttatcgccagcgatggtgcgatgggcatcgttgatgccggtaatgcaggcatggcgagcggcggcatgggcgatgtgctctctggcatcattggcgcattgcttggacagaaacttcccctttatgatgcagcctgtgccggctgcgtggcccacggtgcggcggctgacaggctggctgctcgttacggaacgcgcggaatgctggccaccgatcttttttgcacgctgcggcgtgttgttaacccggatgtgattgacgtagaaaatgactaatcgagcgattcctttacctgatgaacaagccactttagatctcggcaagcgcgtggcgcaggcctgtcagggggcgaccgtcatttatctgtatggtgatttaggcgcgggtaaaacaaccttcagccgtggctttttgcaggcgttaggccataacgggaacgtaaaaagcccgacctatacgctggtagaaccgtacacgcttgaaaatatcatggtgtaccactttgatttatatcgtcttgcggatcctgaggagctggaatttatggggatccgcgattactttgccaacgacgccatctgcctggtggagtggccgcaacaaggtgcgggtgtgctgcctgacccggatgtcgaaattcacttagattaccaggcacaagggcgtgaggcgcgcatcagtgcggtttcctcatcaggctgttccttactggcgcgtttagccggttgagcgtagggataacgggatgattaatcgcgttaaaggttgggtgctggctgccacggtcctgctgtgcgcgcaggccggggcggccagcctctcggatattcaggtgtcgaatggcgatagccaggcccgtattacgttcagctttatgggcgatcctgaatatgctttctcacaaatcgacagccgcagcgtggcgctcgatattaaacagaccggggtgatccaggggctgccgctccagttcagcggcaacaatctggtgaaaagcatccgttcggggacgccgaaggatgcgcagtctctgcgtctggtggtcgatctcaccgaaaagggcaagacgaaggcggttaagcagcaaaacggcgccaattatacggtggtctttaccattaatgctgatgttccgccgccaccgcctgcacctgttgtagcaaaacgcgtggaggcgccggtttataccccaaggccgtctgagccagcccgtaatccgtttaaatcacaaaatgaccgacttaccgccgtgaccagcagcaatacggtgacgcgtccggcggtcagcgcgcggcgaacgccggtcagtggcgacaaagtgattatcgccatcgacgccggacacggcgggcaagatcctggcgcgattggcccgggcggcacgcgggagaaaaacgtcactatcgccattgcccgtaagctgcgtgcgcttctgaatgacgatccgatgtttaaaggggtcatgacccgcgacggagattactttatttcagtgatgggacgctcggatgtggcgcgtaagcaaaacgccaacttcctggtgtcgattcacgcggatgctgcgccgaaccgtaacgccaccggcgcgtcggtatgggtgctgtcgaaccgtcgcgccaacagtgaaatggcgaactggcttgaagagcacgagaagcagtctgaactgttaggcggggcaggcgatgtgctggcaaacagccaggccgatccgtatctcagccaggcggtgttggatttacagttcggtcattctcagcgcgtcgggtatgatgtcgccactaacgtactgagccagctgcaaagcattggatcgctgcataagcgtcgccctgagcatgcaagcctcggtgtcctgcgttcgccggatattccgtcgattctggtagagacgggctttatcagtaacaacggcgaagagcgcctgttgggcagcgacagctatcagcagcaaattgccgaagcgatttataacggtctgcgtaaatactttgacgcgcatccgcttcagtctgctccgcagggcggggccgcccagacggcaagcgccgcgctgccgggtgagatgaccgcgactaattaaggagagttcatgccgattcaggttctaccgccgcagctcgcgaaccaaatcgccgccggtgaggtggtggaacgccctgcgtcggtggtgaaggaactggtggaaaacagcctcgatgcaggggcgacccgcattgatattgatatcgaacgtgggggcgcaaagcttatccgcattcgtgataacggctgtggcatcaaaaaggacgagctggcgctggcgctagcgcgtcatgccaccagtaaaattgcctcacttgacgatctggaagcgattatcagcctgggttttcgcggcgaagcgctggccagtatcagctccgtttcccgcttaacgttgacctcccgcacggccgaccagcaggaagcctggcaggcctacgccgaagggcgtgatatggacgtcacggttaaacctgcggcgcacccggtaggcaccacgcttgaagtgctggatctcttctataacacgcccgcccggcgcaagtttatgcgaaccgagaagaccgaattcggacatatcgacgagatcatccgccgcatcgcgctggcgcgctttgatgtcaccatcaacctcagccataacggtaaggtgatgcgccagtaccgcgcggtggcggagggtggacaaaaggagcgtcggttgggcgccatctgcggcacaccgtttctggaaaaagcgctggccattgagtggcagcatggcgatctggccctgcgcggctgggttgccgatccgaacgccagcagcgccgcgttcgcagaaatccagtattgctacgtcaacggccgcatgatgcgcgaccgcctgattaaccacgctattcgacaggcctgcgaagataagctcggcgccgatcaacagcccgcctttgtgctttatctggagatcgacccgcaccaggttgacgttaacgtgcaccccgccaagcacgaggtgcgtttccaccagtcgcgcctggtgcatgatttcatctaccagggcgttgccgctgtattgcagcagcaggcaaagccagagttgccgctggcaaaagaagagcccgcgccgcgcccactgccggaaaaccgcgtggcggccgggcgtaaccattttgccgaaccggcggtcgcgcgcgagccggctgctccacgtttatccccggcgggcaacgcgccgcgaccaaccggtgccaactatcccaacgctcagccgggctaccacaaacagcagggggcgctgtaccgcaaactgctggatacgccggcggtggagcataaagagcacatcacggtttcaaccccctctctggatgggcatagccagagttttggtcgggtattgaccattattgctcccgacatggcgttgcttgaacgcgaaggtaaactgctgttgctggcgctttccgtggcggagcgctggctcaaacaggcgcagttaaccccggggatgaatgccgcctgcgcgcagccgctgttgatccccgttcgcctgaaaatatcccctgaagaaacaggggttttgcggcgcgtgcagacgcaactggccgaaatggggattgaaatcgtactggacgcgcagcatgtgacaattcgcgcagtgcctttacccttacgccaacaaaatttacaaaacttgattcctgaactgataggctacctggcgcagcaaacgacgtttgatgccgccgataccgcgcagtggatcgcccgccatctggccagcgagcatgcaccgtggagtatggcgcaggcgattaccgttctggcggaggtggagcgcctctgtccacagctggtgaaagcgcctccaggtggtttgttacaacctgttgatttacaaacggcgatgaccgccctgaaacatgactgatgtaagtaaggcgagcctgccaaaggcgatttttttaatggggccaacggcctccggtaaaacggcgttagccattgagttacgtaaagttttgccagtagagttgattagcgttgattcagccctcatctaccgagggatggacatcggcacggcgaagcccaacgcagacgaactgcgtgcggcaccgcaccgtttactggatattctcgacccggcacaggcttactccgcggcagattttcgccgcgacgccttagccgagatggccgagattaccgccgcgggacgcataccgctgttagttggcggcacgatgctctactttaaggcgctgctggaggggttatcgcctctgccatcggccgatccggaagtgagagcgaagattgagcggcaggcggcagagcaggggtgggacgctttgcacaggcaactggaagagattgatccggttgccgcagcgcggatccacccaaacgatccgcaaaggctttcccgggcactggaagttttttcatttcgggtaaaactttaacggaactgacgcaaacgtcaggagacgctctgccgtatcaggtgcatcagttcgccatcgccccggcgagccgtgaactgctccatcaacgaattgagcagcgttttcatcagatgttggcttcagattttgaagcagaagtgcgggcgctttttgcccgtggagatttgcatacggacatgccttccattcgttgtgtgggataccgccagatgtggtcgtatcttgaaggtgagatttcatacgatgaaatggtttatcgaggtgtttgcgccacgagacagttagcgaagcgccagatcacctggttacgcggttgggagggtgttcactggttagacagtgaaaaaccacaacaggcgttaaacgaagtgattgaggttattggtgatatcgctgactgaatgtgtacaattaagccgtatcgtgcgcaatttttcagaatcgcaaggttctaagtacaaaacaagcatataaggaaaagatagaatggctaaggggcaatctttacaagatccgttcctgaacgcattgcgtcgggagcgtgttccagtttctatttatttggtgaatggtattaagctgcaaggtcagattgagtctttcgatcagttcgtgatcctgttgaaaaacacggtcagccagatggtctataagcacgcgatttctactgttgttccgtcccgtccggtatctcatcacagcaataacgctggcggcggcactggcagtaactaccatcacggcagcaacgcgcagggttcttcaacaccagcgcaggacagcgaagaaaccgaataaggttttgggctgttatccacacggggagccagggatcctgcgttccccgctgatctttttagagaggtttacgcttgtttgaccgttatgacgccggtgagcaggcggtgctggtacacatctatttttcgcaagacaaagatatggaagacctccaggagtttgaatctctggtctcttccgccggtgtcgaagcaatgcaggtgattaccggtagccgtaaagcgccgcacccgaagtactttgttggtgaaggtaaagcagttgaaattgcggatgccgtaaaagcaaccggcgcatccgttgtgctgtttgatcatgcgctgtctccggctcaggaacgtaacctggaagctctctgcgaatgccgtgtaatcgatcgcaccgggttgatcttagatatttttgctcagcgtgcgcgtacccacgagggtaagttgcaggttgagctggcgcagttgcgccatctggcgacgcgtctggtgcgtggctggacacaccttgaaagacaaaaaggcgggagttggtttgtcgcggcccgggtgaaacccagctcgaaaccgaccgccgtttgctgcgtgggcgtataacccagatcctttcacgtctggaacgtgtagagaaacagcgcgaacaggggcgtcgggcgcgaacgaaagccgatatcccaacggtgtcgctggtgggttataccaacgccggtaaatccaccctgtttaaccagataaccgaggcccaggtgtatgccgcagaccagctgtttgcgaccctggacccaaccctgcgccgtattgacgtcgcagacgtgggtgaaacggtgctggcggataccgtagggtttatccgccatctgccgcacgatctggtcgcggcgtttaaagcgacgttgcaggagacgcgtcaggcgaccctgctgctgcatgtgattgatgcggctgacttacgcgtgcaggagaacatcgacgcggtgaacgtggtgctcgaagagatcgacgcccacgaaattcccaccctgttggtgatgaacaagatcgatatgctggacgatttcgaaccgcgtattgaccgagacgaagagaacaaaccgattcgggtctggctgtctgctcaggccgggattggtgtgccactgcttttccaggctttgacagaacgtctttccggtgaggtagctcagcacacgctgcgactgccgccacaggaaggcaggctgcgcagccggttttatcagcttcaggcgatagaaaaagagtggatggaggatgacggcagcgtggggatgcaggtgcgtatgccgatcgttgactggcgtcgcctctgtaaacaagaacctgcgctggcggactatatcgtctgatcagaaaggggaagcctgaaaaattcgcccttgcataacaaatatggagcatatacatggcgtggaatcagcccggtaataacggacaagaccgcgacccgtggggaagcagcaataatcaaggcggcaactctgggggaaatggcaacaaaggtggtcgcgagcaggggccgccggatctggatgatatcttccgcaaactgagcaaaaagcttggtggccttggcggaggaaaaggttctggctcgggtggcaattccactcagagtccgcgcccgccaatgggtggccgcgtggtgggcattgtcgccgctgcggtggtaatcatctgggcagccagcgggttctacaccattaaagaagcagaacgcggcgtggtcacccgtttcggtaagttcagccatctggttgaaccgggcctgaactggaagccgaccttcattgatgacgtgaccgcggttaacgtggagtccgtccgtgagctggccgcctctggcgtgatgttgacctctgacgagaacgtggtgcgcgttgagatgaacgtacagtaccgcgtgaccgatccggaacgttatctgtttagcgtgaccagcgccgatgacagcctgcgtcaggcaaccgacagcgccctgcgtggcgtgatcggcaaatacaccatggaccgtatcctgaccgaaggtcgtaccgttattcgtagcgatacccagcgtgagctggaagagaccatccgtccgtacaacatgggtatcaccctgctggacgtcaacttccaggctgcacgtccgccggaagaggtgaaagccgcgtttgacgatgcgattgccgcgcgtgaaaacgaacagcagtacatccgtgaagcggaagcgtacaccaacgaagttcagccgcgtgcaaacggtcaggcgcagcgtattctggaagaagcgcgtgcgtataagacccagaccatcctggaagcacagggtgaagtggctcgctttgcgaagatcctgccggaatataaagccgcgccggaaattacccgtgagcgtctctatatcgagaccatggaaaaagtgctgagccatacgcgtaaagtgctggttaacgacaacaaaggcggaaacctgatggtcctgccgctggatcagatgctgaaaggcggttctgcaccggcagcaaaagacaacagcggtgcgaacaacctgctgcgtctgccaccggcctcgtctggcagcgccagcgcgaacacaacgccttcttcgaacgatggtgacattatggaccaacgccgtgctaacgcgcagcgtaacgactaccagcgtcagggggaataaggatgcgtaagtcagttattgcgatcatcatcatcgtactggtcgtgctctacacctccatctttgtggtgaaagagggcgagcgtgggatcaagttccagttcagcagcgtcgtgcgtgatggcgacaagcgtccggtgatttatgagccgggtctgcactttaagatcccgttcattcagtcagtgaaaacgctcgatgcgcgtatccagaccatggataaccaggccgatcgtttcgtgaccaaagagaagaaagacctgatcgttgattcctatatcaaatggcgcatcagcgatttcagccgctacttcctggcaaccgggggtggcgacgtttctcaggcagaagtgctgctgaaacgtaagttctctgaccgtctgcgttctgaaattggtcgtctggatgtgaaagacattgtgaccgactcccgtggtcgtctgacgctggaagtgcgtgatgcgctgaactccggctctgcgggcaccgaggatgaagttgaaaccccggcggcagacgatgcgattgccaaagcggctgaacgtgttcaggctgaaaccaacggtaaagtgccggtgatcaacccgaacagtatggcggcgctgggcatcgaagtggttgatgtgcgcatcaagcagatcaacctgccagcggaagtgtccgaggcgatctacaaccgtatgcgcgccgagcgtgaagcggtagcccgtcgtcaccgttcacagggtcaggaagaagcggaaaaactgcgcgcggcagcggactatgaagtcaccaagacgctggcggaatctgagcgccagggtcgtatcctgcgcggtgaaggtgatgccgaagcggctaaactgtttgctgatgcattcagccaggatccagacttctacgccttcatccgtagccttcgcgcttacgagaatagcttcaagagcaaccaggatgtgatggtgctcagcccggacagcgatttcttccgttatatgaagacgccgaccaacgcaacgcgataaactcaggctcgtttgagtattcaaaccaccgctcttcacggagcggtggttttcttttataaggatgaaaaatgaactccacgatctggctcgcactggccctggttttggtgctggaaggcctcggcccgatgctctatccgcgcgcatggcgccggatgatcgcgacaatgagccaactcccggacaatattttgcgtcgttttggcggtggtcttgtggttgccggtatcgttatctactacatgttgaggaaaacgattggctgatcaaaaactaaccgcaattggcatattttagggtcaaaaagtgctgtatatctgaaaaagcgatggtagaatccatttttaagcaaacggtgattttgaaaaaatgggtaacaacgtcgtcgtactgggcacccaatggggtgacgaaggtaaagggaagattgttgatcttctgactgaacgggctaaatatgttgtacgctaccagggcggtcacaacgcaggccatactctcgtaatcaacggtgaaaaaaccgtcctccatcttattccatcaggcattcttcgcgaaaacgtcaccagcatcatcggtaacggcgttgtgctgtctcccgctgcgctgatgaaagagatgaaaggtctggaagaccgtggtatccctgttcgtgagcgtctgctgctctccgaagcctgcccgctgatcctggattatcatgtggcgctggacgtggcgcgtgaaaaagcgcgtggcgcgaaagcgatcggcaccaccggtcgtggtatcggcccggcttacgaagataaagtggctcgtcgcggtctgcgcgtgggtgacctctttgacaaagcgaccttcgctgaaaaactgaaagaagtgatggaatatcacaacttccagttggtgaacttctacaaagccgaagccgttgactaccagaaagtgctggatgacgtcatggcgattgctgatattctgaccggtatggttgttgatgtgtccgatctgctggaccaggcgcgtaagcgtggcgatttcgtcatgtctgaaggtgcgcagggtacgctgctggacatcgaccacggtacctatccgtacgtaacgtcctctaacaccaccgcgggtggcgtggcaaccggctccggtctgggcccgcgttatgtcgattacgttctgggcatcatcaaagcgtactccactcgcgtgggtgcaggtccattcccgaccgaactgtttgatgagaccggcgagttcctctgcaagcagggtaacgagtttggcgcgaccaccggtcgtcgtcgtcgtaccggctggctggacgccgttgccgtacgtcgcgcagtgcagatcaactccctgtctggcttctgcctgaccaagctggacgtactggacggcctgaaagaagtgaaaatctgcgtaggctaccgtatgcctgatggccgcgaagtgaccaccactccgctggctgctgacgactgggaaggcattgagccaatctacgaaaccatgccgggctggtctgagactacctttggtgtgaaagagcgtagtggcctgcctaaagccgcgctggactacatcaagcgcattgaagaactgaccgaagtgccgatcgatattatttctaccggcccggatcgtactgaaacgatgatcctgcgcgacccgttcgacgcataatcttcgtgactgctggcctgcggggaaacccgtaggccggataagcgcagcgccatccggcgaccgctcctggatctccgctttttcgccccgtctgtcaaataaattagccgctaactatctggctggtttatcatcattaatgaatatctctgcggtttgaccgcgttttccctttttcctgaggttgatgtgcagttaacaagtttcaccgattacggcttacgcgcgctgatttacatggcgtcgttacccgatgggaagatgaccagcatctctgaagtcacagaggtgtacggtgtgtcccgtaatcatatggtcaaaataatcaatcaacttagtcgtgccggatacgttgctgccgtccgcgggaagaatggagggatccgtctcggtaaaccggcgcagagtatccgtattggcgatgtggtacgtgaactggagccgctctctctggtgaactgtagcagcgcgttctgccacattacgcccgcttgccgcctgaaacaggcgctttcaaaggccgtgcaaagttttctcaaggaactggataactacacgctggccgatttggttgaagagaatcaaccgctttataaattattgctggtggaatgaagaaaatttccaccggagctgacaacggaggaaccgacatgtcacaagatcctttccaggaacgcgaagccgaaaaatacgcgaatcctatccccagccgcgagttcatcattgaacacttaacaaaacgcgaaaaacccgccaatcgtgaagaacttgccgttgaactgaacattgaaggtgaagagcaaattgaagcccttcgccgccgcctgcgcgccatggaacgtgacgggcaacttgtctttactcgtcgccagtgctacgcgctgccagaacgcctcgacctgctgaaaggcaccgttattggtcatcgcgatggcttcggcttcctgcgcgtggaaggccgtaaagacgacctgtacctctcatccgaacagatgaagatgtgtattcacggcgaccagatcctggcgcagccgctgggtgcagaccgtaaaggccgccgcgaagcgcgcgtggtccgcgtgctggtgccgaaaaccagccagattgtaggccgttactttaccgatgcgggcgtaggctttgtggtgccggacgacagccgtctgagcttcgacattctcatcccgcctgaagaggtgatgggcgcacgcatgggctttgtggtggtggtggaactcacccagcgcccaacccgtcgcaccaaagcggtgggtaaaatcgtcgaagtgctgggcgataacatgggcaccggcatggccgtcgatatggcgctgcgtacccatgaaattccgtatgtctggccgaaagcggttgaagatcagattgaaaacctgcgtgaagaagtgccggaagagtccaaagcaggccgcgtggatctgcgcgatctgccgctggtcaccattgatggtgaagacgcccgtgacttcgatgatgccgtatattgcgagaaaaaacgcggtggcggctggcgtctgtgggtggctatcgcggatgtgagctattacgtgcgtccgcacacgccgctggataacgaagcgcgcagccgcggtacgtcggtctacttcccgtcgcaggttgtaccgatgctgccagaagtgctctccaacggcctgtgttccctcaacccgcaggtggaccgcctgtgtatggtctgcgagatgaccatctccagcaagggacgtctgacgggctataagttctacgaagcggtgatgagttctcatgcgcgcctgacctataccaaggtctggcatatgttgcagggcgatcaggatcttcgcgaacagtacgcgccgctggtcaaacacatcgaagagctgcacaacctctacaaaacgctggatcaggcgcgcgaagagcgcggtgggatctcgtttgagagtgaagaggcgaagtttatctttaacgctgagcgtcgtatcgagcgtatcgaacagactcagcgtaacgatgcgcacaagctgattgaagagtgtatgatcctggcgaacatctcggcggcacgtttcgttgagaaagccaaagagcctgcgctgttccgtattcacgacaagccaaccacggaggccgtaacctcgttccgctccgtgctggctgaactcggcctggagctgcctggcggtaataagcctgagccacgcgattacgccgagctgctggaatccatcagcgatcgtcctgacgcggaaatgctgcaaaccatgctgctgcgctccatgaagcaggcgatttacgatcctgaaaaccggggccactttggtctggcgttacagtcgtacgcgcactttacctcgccgatccgccgttatccggatctgtccctgcaccgtgcgatcaagtatctgctggcgcacgagcagggtcataaaggcaacacgaccgaaaccggagggtatcactactccatggacgagatgttgcaactgggccagcattgttccatgaccgagcgtcgtgcggatgaagcgacgcgcgacgtggcggactggctgaagtgtgactttatgctggatcaggtgggtaacgtctttaaaggcgtgattgccagcgtcaccggctttggcttcttcgtgcgtctggatgagctgtttatcgacggtctggtgcacgtttccagcctcgataacgattactaccgcttcgaccaggtcggacaacgtctgatcggcgaatccggcggccagacctaccgtctgggcgatcgggtggaagtgaaggttgaagccgtgaatatggacgaccgtaaaatcgacttcagcctcatctccagcgagcgtgctccgcgtaacgtcggcaaaaccgagcgtgagaaagcgaaaaaaggcggtaacggtaaagcgggcggtaagcgacgtcaggcaggtaaaagagtaaactttgagccagacagtgctttccgtggcgagaagaaacagaagcccaaggcggcgaaaaaagacgctcgtaaagcgaaaaaaccgtcgaccaagacccaaaaaatagcggccgcgaccaaagcgaagcgcgcggcgaagaaacagcaggcggagtaatttcccctcaccctgaccctctccccaacgggagagggaaaatatttattacgagaaccatcaatgagtgaaatgatttacggcatccacgcggtgcaggccctgctggagcgcgcgccggagcgttttcaggaagtttttattctgaaagggcgtgaagataaacgtctgatgccgctgatccacgcgctggaagcgcagggcgtagtgatccagctggcgaaccgccagtatctggatgaaaaaagcgaaggtgctgtacaccagggtattatcgcgcgcgtgaagccaggccgtcagtatcaggagaacgatctgccggatctgatcgccgggctggagaacccgttcttcctgatcctcgatggcgtaaccgacccacataacctgggcgcgtgcctgcgtagcgccgatgcagcaggcgtgcatgcggtgattgtgccaaaagatcgctccgcgcagcttaacgctaccgctaaaaaagtcgcctgcggcgcggcggaaaacgtcccgttaatccgcgtgactaacctggcgcgcaccatgcgtctgttgcaggaagaaaatatctggatcgtaggaacagccggtgaagcggatcacaccctgtaccagagcaaaatgaccggccgtatggcgctggtgatgggagcggaaggcgaaggtatgcgtcgtctgacgcgcgagcactgcgatgagctgatcagcatcccaatggcgggcagcgtatcgtccctgaacgtttccgttgcgacgggtatctgcctgtttgaagcggtgcgtcagcgcgggtagcctgttgtgccgggtggcggcttcgccttacccggcctacaaaagcatggtaccgtaggcccggtaagcgtagcgccaccgggcaacaatctcactcctctaacgaccgtaaatggtcatcctttctcagcgtcatcagcgcgaaaatactcaccaccgccgttgccatcacgtagtacgccggaatatccagattgcccgtctctttaatcagcccggtaatgatcagccccgcacagcccgagaagatcgcattcgacagagaataggccagccccagcccggtataacgcacgcgcgtcgggaacatctcagacagcattgccggccccggccctgccagcatcccaaccagaccccccgcaatcagcaccacaatcgctttgactgccagcgtactggattccgcctgcaaaattttcagcagcggcagggcgaggatcagcaggagcacggtggcgataatcatcaccgtgcgccgcccgatcctgtcgctcagcatgcccgacggaatgatcgtgagcgcaaacccaatgttagaaatcaccgcaatcagtaacgcctggttaaaaccggtgtgcagcgcagattgcagataggtcggcataatcaccagataggtataacccgccgcagaccagaccatcacgcggccaatgcccatcaggatggttttgaacgtggcggcggtgctggcctgagtaacaaccggtttttcccgttgctgcacaaagctcggcgtctcttccatgctcacccgcagccatagcgcgaccgcacccatcggcagcgccaggaagaacggaatgcgccagccccagtcgtgcaaggcttcaggggagagcagggcagagagcaacgcgacaatgcctgcgcccgctaacagcccgagcgccacggtaaaggactgccatgccccgtaaagaccgcgcttgccgcgcggggcgaactccgtcatcaatgagaccgcaccgccatactcaccgcccgcgaacagtccttgcagaatacgcaggagcgtaacgatcagcggcgcggcaatcccgatactggcgtagaccggcacaataccgatggcagcggtggcgagcgtcatcaataccagcactataatcagcgtcggtttgcggccaatcctgtcgccaatgcggccaaagaccaccgcacccagcggacggaagaagaaagcgatggcgaacgaggcccaggtgaggatcaggctggtgagctccgcttccccctcaagctggaagaagtttctggcaatcaccgttgccagaaaaccgtagaccgcaaattcataccactcgatgaaattaccgatggagcctgcaattaatgcacgcttgtgcgcatcctgttgcataacgatcctcacataaacggggtaagaataaattattcagcattggtgaagtaatgaaatagtttattcttatattctgtgagctatttcacgaatgatatcaacacgatcgtcatcgtgtgacccccctcccatgcagcgtgcatgccctctgtccatacttacctttattgccaatgaaaggagggagacagcatgcactggcagacacataccgtttttaatcaacctgcaccgctatcgaacagcaacctttttctctctgattgcgccctgcgcgatgcggtagcgcgcgaaggggctgagtgggatgtggatcttcttgccagcatcggacagcagttgggtacggcggagtcgctggagctgggcaggctggcgaacgttaatccgccggaactgctgcgttatgacgccacgggagcgaggctggatgacgtccgctttcatccggcatggcatcttctgatgcaggggctttgcgccaaccgggtgcacaacctggcgtgggaggaggaggcgcggaaaggatcgttcgtcgcccgggccgcgcgttttgtgcttcatgcacaggtggaggcgggaacgctatgcccggtgaccatgaccttcgccgccacgccgctgttgctacagtcgctgcccaaaccgtttcacgactggttaacgccgctgatgagcgatcgctacgatccccatctcgcaccgggggcgcaaaagcgcggcctgctgatcggcatggggatgacggaaaagcagggcggttcggacgtactcagtaataccaccaaagcagagaaatgcagtgatggcagttaccggctggtggggcacaaatggtttttctccgtgccgcagagcgatgcgcatctggtgctggcgcaggcgaagggcgggctttcctgcttttttgttccgcgttttttacccgacgggcaacgtaatcgccgtgcgccttgagcgtctgaaggacaagctcggtaaccgttcaaatgccagcagtgaggctgagttccttgatgcttacggctggctgctgggcgaagagggtgaaggtgtccggcaaattctgaagatgggcgggctgacgcgctttgactgtgcgcttggcagtcacggattgatgcgccgtgcgctctcggtggcgctttatcatgcccatcagcggcagaccttcggcaaaaatctgatcgaccagccgttaatgcgcgacgtgctaagccgtatggcgctggtgctggagggacacacggcactgctgttccgactcgcccgggcgtgggacaaccgcaccgacccgcaggaggccgcatgggcgcggcttttcactccggcggcaaaatacagcgtctgcaaagcgggcataccgtttgtggcagaggcaatggaggtgctgggcggtgcaggctattgcgaagagagtgaacttccgcggttgtaccgtgaaatgcccgtcaacagcatctgggaaggctctggcaatattatgtgcctggatgtactgcgcgtgctggcgaagcagtcgggcattctcgacctgctcgccgatgatttcgcgcaggtcaaaggtcaggacaggcacttcgatcgcagctggcggcagctacagcagaagctgcgtaaaccgcaggaagcgcagggcagggagatcgcgcggcagctctttttactcggggccggaagccagatgctgcggcacgcatcgccgcccgtggcgcaggcgtggtgccgcatgatgctggatacccgaggcggcacgctgatgagcgaacaggtgcaaaacgacctgctgctgcgcgccacgggccgggtcggttaagccttcagctggaacaggctcaccagccgggtgagatgtgaacccttctcgcgcagcgtctgtgccgtctgctcgctgcgtgagatgcgatcggcattgatgtgcgatgcctcaccgatgtgcgtcatcgccagattcacctgaccaatccccgcagactgctcgcgggaggcgtggttgatctcggtgacaagctggctgatgttatcgatatgaacaatgatggcatccatcgccagacgcgtctgctcagacagcgcatggccttcgctcaccttgttcagcgtgtcgccaatcagctgttcaatctcttttaccgcgttggcgctgcgtgcggccagggcgcgcacctcttgcgccaccactgcgaaacctttcccgtgctcgcccgcccgcgccgcttcaaccgccgcattgagcgccaggatattggtctggaaagcgatggactcaatcacgcgggtaatgtcttcaatgcgtttcgatgcatcacgaatatcatccatggtggaaacagcgtgggtcaccgtctctccaccctgatgcaccgcgcgtgaggtttcccccaccagctgctgagtttgctccatgttggcggcattttgctgcacggtggcggctaattgctccatgctggcggaggtctcctcaacgctgctggcctgtttgttgatctgttcagagatctcgccggtgtctgaagccagcgcgttagtccccagatggatttcgcttgcggcctcgcggacctgcaacacaattttttgcaggccgcccccgatcccgttgatggcatcaatcagctggccgacctcatcctggcgggttaccggcaggctggcgcgcagatcgcctgcggcatactgccgggcaagcgcaatcactgcgcgtagtgggcgggttagcatccggcgaatgaggataacgaacaggcccgcgaagagcgcggatagcaccacgcccgccatcaggaagcgatcgcgcagcgtggtgacgcttgaaagcagtacggctttatccacttcacccacgatggtccagttccagcccggcagcggcgtgtaggcaactttgagcgtacggccatctgcgctcacgcgctccagcgtgccggctttatcactcagaagctgctgctgtgtcgccgtgtcccagttgggcagtttgccctcatcgctggcatggaacagatactgtccgcgcgttttgccgctgctgcgatccagtacaaagaagtggccgctctcgcccagacgacggttaaggattttctcgcgcatgacgttccacgaatgggtgatgtccacaccgacaaagataatcccgataacctggccttccgcatttttaacaggctggtactgcgtgatatagcgcttgccgaacagcagcgcgaggccacgatagaccttccctttggtgacagccgcaaatgccgggctggtggtatcaagaacggttccgatggcgcggtcgccattctctttgcgcagcgacgtggccacgcggataaaatcgttaccgctgcggacaaacagcgtcgagatggcgcccgttcggctcaggaagtcatcagaaagcgtattgttttcatgcaactccgtttcgccgcctttcagcagaggaacggtaagcccgtttatggtccggctctggctgctgtcgctgttcagcggctgtggcaaaaaggtcgtgaacagacgggtatagctttcaacctcttcgctcaggctggtgttgaacatctcaaccatatccaccatgccggtggactggttgtgcaggtcttcaaccgcaagatcttcaagctgctggctggcgttgtggctcaacagaaaagtgaacagcaaaaaaagcgtggcgacacttgcacctgttagcagcgatagcttcgtgcccagacctgcccggcggaaaaaggtgatcataaattgctcattattgaaaagtgatggctgttcaacggcagagcgaagagaacgtttatctgtttaatgtaactgaatgttacatgtttgtttttattaagtttcgggagaggtaaaaaatttgcaaaattgaaaagccactaaaattaagtggcttttatcggaagggattatgcataaagaatggcctgcacgcgccagtgattaacatggttatcttcctgcatctggacgatgcgataccaggatgcgccctgttcatcggccttcagggcggacgacacgttcaacgtcttgcggacttcccgtgatattattgacggagatctgaccaatctcgttcaggcccgtgacgcaatccgcgctggcaaattcggccgactgcgctgtggtgctcagcaggcccgctgaaagcaatagcgtcgttaaagcaagggttcgtttcatcgtcagctccttttcacgtgtctccggtatccgccgggcaatccttcgcgaataaactcatttccattgttgctggcatggagtttattgtggacaggaaaatgtctacggacgcaaagcagtgtaaaagtcgttcaaatgatgatgcttacttacggtacaaaattccctgggcgtaccactgtcccgtaataatggtttcatcaatcatcgtgatgacgtaataatctgcttttgcggcaactgcctgtgcttcaattgcgtcttctgcatcatccggggaaccacgaaccatcgcggatacggtacccaggcgttgtaatccttccgtctgattacgacgaatttcctgaggatgatcggtaaccggcggcgccggttctggcgtaccctgcaatatggaacatccgctgagcagtgaggccagcaataaagccgtaagcctgcgcataaacctgtctcttttcctgatagccatagtgtagttgtctgcgaatttagttttgggggaatgttcccgaagtgttatctgggacgtagatttcgaatgaaaatatcgtgaaaccgtaatccagctctcaacattatgaatcattcatcagcacaggatcgacaatgattgaaattgaaactcgccagctgagtgggcatgaaatcatccatgcttttccggctggtaaagatgaacagccgctgccgacggtagttttctatcatggctttctctcctcgaagctggtctacagctattttgccgtcgcgctggcgcaggccggtttccgggtggtcatgcctgatgcgccgaatcatggggcacgctttacgggcgatgagcaggcgcggctggggctgttctggcaaacgctgcacggcaatctgaccgagttcgccgggctgcgtgacgcgctcttgcaggccgggctggtggaggggaaacggctggcggtcgcaggcgcatcaatgggcggaatgacggcgctgggaatcatggccaggcatccggaggtgacgtctgtcgcttgcctgatgggatcgggctactttacgtcactggcaaagacgctgttcccgccgcaggcccctcaggagattgaggccctgttgtctgaatgggacgtcagccatgcgctttcgcagctggccgatcgtccgctgcttctgtggcatggggacgccgatgacgtcgtaccgcccggtgaaacgttccgcctgcaacaggcgctacagcgtgaagggctggacagcaatctgacctgcctgtggggagcaggtgtccggcaccgtattaccccggccgcgctggagtcaaccgtggaattcttccgtcagcacctttaaacgcgcagcactgtgacaccctgatcctccagcttgctgaggatctcggggttggcgtttttgccggtgatcaccatgctgatttgctcggcgcggctgaaaagcatgccggcgcgttcaccgaccttgctgctgtcgaccagcaccaccagtttgcccactacgttaagcatgttctgttctgccattgcggtgagcatatcggttttatacaggccatccgccgtcagacctttgccgctggtaaacatccagtgcccggcgtagaggctgttttcactgtcctgcgggctaagggtgatggactggctcttgttatactggccgcccatgatcaccacgctttcatgttcctggtcaatgagatagttagccagcggcaaatagttggtgatgatttgcaccggcttgccgcacatctcacggcccagcagaaacgccgtcgaaccgcagttgatcaccacgctttctccaggatttaccagctgtgatgccgctctggcaatccgcaccttttcatcgtgattctgcgcctggtggatgttcatcggcgtccagcgtggacgctgctggctgatggcctctgcaccgttgcggacttttttcagcttgccgctctcatccagcttgttaatgtcccgccgcgcggtagcgggggagatccctaaacgttcgatcactttctcgacggtgataaaccctgtttgcgccaggagttccagtaaaatttgatgccgttgcgcttccgtcatgagctattccgataagaattgatttgaaaagatgatatttgaaatagcgtgaaattactaagataaatatgacatcgccagacgcaaggtctggcgattgggcctcagaatcagaggaaggatttgaacggcagatcgggttcaatcgtaaagcaatcatcgaaaccacgcgggtagtggtactcaagattgtctttatccagcggccaggtgaacttgccgccaacctgccagatgaacggcttgaagccatacttgaggcggtcttttttcatctcccacaggacgcggatctcttgcggatcggcctggaagtttgaccagatatcgtggtggaacgggatcaccaccttggtgttcagcgcttcggccatacgcagcatatccgcgctggtcattttgtcggtgatcccgcgcgggttttcaccgtaagagccaagcgccacgtcaatctgatgctcgttaccgtgcttcgcgtaatagttggagtagtgggagtcaccgctgtgatacagggaaccgccaggcgttttgaacaggtagttcaccgcgcgctcatccatcccgtctggcagtacgcctgcggctttctggtcggcaggcagggtgatcagcgcggtacggtcaaaggcatccagcgcgtgaatttcaatgtctttgattttcactacgtcgcccggcttcatcacgatgcagcgctcttttggcacgccccagccaatccacaaatccacgcaggtctgcggcccaataaacggtacgtcgtccgcgcagttttgcattaccgctgccgccacgttcacgtcgatatgatcgttgtgatcgtgggtagagagtacggcgtcgatctgacgaatggcaaaaggatccagcacgaaaggcgtggtgcgcaggttcggctggagcttttcaacgccggccatacgctgcatctggtggccttttttcatcagtggattgccgtggctctgtttgccggtgccgcaccagaaatcaacacaaatgttggcgccgccttctgatttcagccagatcccggtgcagcccagccaccacatcgcaaatgtgccaggagcaacctgttcctgctcgatctcttcgttcagccagctcccccactccggaaaggtactcagaatccatgattcacgggtgatggttttcactttactcatcgtttgactcctggttttaatcaaaagtaatcactatatgacttgttgtgattaatgctggcactgttttaatcgatttgcaatggctgatttacggaaaattcccctcgccacctcacagaaaaaacttcatgacgttgttaagataaccgttataaatgattaatgtattgaaatttaaggatttatttatttggttggattggtagtgaaaatcattactaataccatggaaataaattgcgtgatccgtcacaaataatcaaatgcaatcttgtgatgattatttgtgattaatagagtgatgacaccaaccacacagggattgcccctcgtgttctcattttctggagagagttatggagatcctctacaacgtctttaccgttttctttaatcaggtaatgaccaacgccccgctgttgctgggtatcgtgacgtgcctggggtacatcctgctgcgcaaaagcgtcagcgtgattatcaaaggcaccatcaaaaccatcattggttttatgctgttgcaggcggggtctggcattctgaccagcacgtttaagccggttgttgccaaaatgtcagaggtgtacggcattaacggcgccatctctgacacttacgcgtccatgatggccaccatcgatcgtatgggggatgcgtacagctgggttgggtatgcggtactgctcgcgctggcgctgaacatcatttacgtgctcctgcgccgcatcaccggtattcgcaccatcatgctcaccgggcacattatgttccagcaggcggggctgattgccgtttctctctatatcttcggctacccaatgtggaccaccgtcatctgcacggcaatactggtctcgctttactggggcatcacctccaacatgatgtataagccaacgcaggacgttacggacggctgcggcttctccatcggtcaccagcagcagttcgcttcctggattgcttacaaagttgcgccgtacctgggcaaaaaagaggagagtgttgaagacctcaaattgcctggctggctgaatatcttccacgacaacatcgtctccacggcaattgtgatgaccatcttcttcggtgccatcctgctctcctttggcattgacgtggtgcaggcgatggcgggtaaaacccactggacggtctatatcctgcaaaccggtttctccttcgctgtggccattttcatcatcacccagggcgtgcgtatgttcgtcgctgaactgtcggaagcgtttaacggcatctcccagcgcctgatccctggcgcggtgctggcgattgactgtgcggctatctatagctttgcgccaaacgccgtcgtctggggctttatgtggggcaccatcggccagctgattgcggtcggcatcctggtgggctgtggctcctcaatcctgattattcctggctttatcccgatgttcttctccaacgccactattggcgtatttgctaaccacttcggcggatggcgcgcagcgctcaagatctgcctggtgatgggcatggttgaaatcttcgggtgcgtgtgggcggtcaagctcactggcatgagcgcctggatgggcatggcggactggtcaattctggcgccgccgatgatgcagggctttgcgtccgtcgggctggtctttatggccgtcatcatcctgattgccctggcttatatgttcttcgctggccgttcgctgcgggctgaagaagatgcagaaaaacaaacagcagaagtgtctgctcattaaggagtttcgattatgaccgtacgtatcctggctgtgtgtggcaatgggcaaggtagctccatgatcatgaagatgaaagtggaccagtttttaacccagtcaaacattgaccacacggtgaacagctgcgcagtgggtgaatacaaaagtgaactgaatggcgcggacatcatcatcgcctcaacgcacattgccggcgagattagcgtgtcgggcaacaaatacgtggtaggcgtacgcaacatgctgtcgcctgcggatttcggaccaaagctgctggaagtgatcaaagaacacttcccacaagacgtgaagtaaggatgccacatgaaactacgtgattcgctggcagagaataactccatccttttacaggccgaagccagtacctggcaggaagcggtgaagctgggcgtggatctgctggttaaggcggacattgtcgagccgcgttattaccaggccattctggatggcgtggcgcagtttggaccctattttgtgattgccccggggctggcaatgccgcatggccgtcccgaagagggcgtcaagaaaaccggttttgcgctggtgacgttgaaaaaaccactggtgttcaaccacgaagataacgacccggtcgacattctgatcaccatggcggctgtcgatgccaacacccaccaggaggtggggatcatgcagatcgtcaatctgtttgatgatgaagctaattttgaccgtttacgcgcctgtcgtaccgcgcaggacgtgctggatttaattgataacgccactgcggcggccgtttaagaggaattgaaaatgtcattaccaatgttgcaggtcgcgctggataaccagactctgtctcacgcttacgaaaccacccgtctgattgcggaagaagtggacatcatcgaagtcggcaccattctgtgcgtgggcgaaggcgttcgtgcggttcgtgacctgaaggcgctctatccgcataaaatcgtgctggcggatgccaaaatcgccgacgcgggcaaaatcctctctcgcatgtgctttgaagccaatgccgactgggtcaccgtgatctgctgtgcggatatcaacaccgcgaaaggcgcgctggacgtggcgaaagagttcaacggcgacgtgcagattgaactgaccggtttctggacctgggagcaggcgcaggagtggcgcgaagcgggtatccagcaggtggtttatcaccgcagccgtgatgcgcaggccgcaggcgtggcgtggggcgaagccgatatcagcgcgatcaaacgtctggccgatatgggcttcaaagtgaccgtcaccggtggcctggcgctggaggatctaccgctgttccagggtatcccgattcacgtctttattgccggtcgtagcattcgtgatgctgcgtctccggtggaagcggcgcgtcagttcaaacgctcaatcgctcagctttggggttaaggagcgggtatgttgtcaaaacaggtcccgcttggcatctatgaaaaggcactccctgcgggggagtgctggctggagcggttgcagctggcgaagcagctgggtttcgattttgtcgaaatgtcggtggatgagacggacgagcgtctttctcgcctggactggcgccgcgaccagcgtctggcgctggtgagcgccattgccgaaaccggcgtgcgcgtgccatccatgtgcctgagcgctcatcgtcgttttccgcttggcagcgaagatgatgctgtacgcgccgaagggctggagatcatgcgtaaagccattcgctttgcacaggatgtcggcatccgcgtgatccaactggcgggttacgatgtttactatcaggaagccaacgatgaaacgcgccgtcgtttccgggagggcctgaaagagagcgttgagatggcaagccgtgcgcaggtgacgctggcgatggagatcatggattatccgttgatgaactccatcagcaaggcgctgggctatgcgcactatctgaacaacccatggttccagctttatccggatatcggaaacctgtcggcatgggataacgacgtacagatggagcttcaggcgggcatcgggcatatcgtggcggtgcacgttaaagatacccgtcctggcgtgtttaagaacgtaccgttcggcaccggggtggtggatttcgaacggtgcttccagacgctcaaacagacaggttattgcgggccttacctgattgagatgtggagcgaaaccgcggacgacccggcggcagaagtggcgaaagcccgggactgggtgcgcgagcgcatggcgcgggcagggctgatggaggcggaacatgcttaagctgaaacagcaggtctttgaagccaatatggatctcccgcgctgtggactggtgacgtttacctggggcaacgtaagcgccatcgatcgcgagcaggggctggtggtgattaagccgagcggcgtggcctatgacgccatgaaagcggacgatatggtggtggttgacctggaaggacacgtcgttgaaggcaaatggcgcccttcttnnnnnnnnnnnnnnnnnnnnnnnnnnnnnnnnnnnnnnnnnnnnnnnnnnnnnnnnnnnnnnnnnnnnnnnnnnnnnnnnnnnnnnnnnnnnnnnnnnnnnnnnnnnnnnnnnnnnnnnnnnnnnnnnnnnnnnnnnnnnnnnnnnnnnnnnnnnnnnnnnnnnnnnnnnnnnnnnnnnnnnnnnnnnnnnnnnnnnnnnnnnnnnnnnnnnnnnnnnnnnnnnnnnnnnnnnnnnnnnnnnnnnnnnnnnnnnnnnnnnnnnnnnnnnnnnnnnnnnnnnnnnnnnnnnnnnnnnnnnnnnnnnnnnnnnnnnnnnnnnnnnnnnnnnnnnnnnnnnnnnnnnnnnnnnnnnnctgtatcagcgttacccgtctctggggggcgttgtgcatacccattccacgcacgccaccgcctgggcacaggccgggctggcgatccctgctttgggtacgacgcacgcagattacttcttcggcgatattccctgcacgcgagcgttaacgcaggctgaggtcgaaggcgagtacgaacttaacaccggcagggtcattatcgaaacgctgggtgagacggaaccactgcatacgccgggtattgtggtgtaccagcatggtccgttctcctggggtaaagatgcgcatgacgccgtgcataacgcggtggtgatggaagaggtggccagaatggcgtggattgcgcgcggcattaacccacagcttcagggcattgatgattacctgatgaacaagcatttcatgcgtaagcatggcccgaatgcttattacgggcagaagtgaataagtgctctggaataccgaaacagttgtaaccggtggtattccggagccattcataaaaaagcccccgggcagggggcaaattatatatggctttgattttcgttggctttcctggtgctagcgataaagcgttactggtaaatatctgcactggcgtgcatattaccgttgctgccgggctcacgtgtcagcatgacgtgatagtattttgcgccctgcgcatcggtttcttcattaagcgcctgatctgcttcactttcagtggcgaagttatgattgatgtaaataacgcctaagctctgcacatcatccatgtttctggcctgttggctgtctattctgatggctgccatcgcgtttgcactgagcaaaagcgcagccaaaatggcgattgcgattcttttcatgatatgcgctccacgactgcgtgctgtgatacggggtaatgttctccttctctgttcagtgtctctgattaaagtgtaatcgctacccgggttgcgatggatgaccatttctgatggtgttgttcaaaaaaacagcgcttctgatgagtgcgattttaaatcacccacttagaacagctttaccctttgtgcgaattatttgtgcaatcagcttgagtttcctggggggcgcaagtattatgacgcgtcaatttttcagccgacctttaacacgttccttgcctccccgggcctcggctgacccagacaggaggctgaataatccgtaaggagcaattcgatgcgtcattacgaaatcgtttttatggtccaccctgaccagagcgaacaggttccgggcatgatcgagcgttactctgctgccatcactggtgcagaaggcacgatccaccgtctggaagactggggccgccgtcagctggcttacccgatcaacaaactgcacaaagcacactacgttctgatgaacgttgaagctccgcaggaagtgatcgatgagctggaaactaccttccgcttcaacgatgccgttatccgcagcatggttatgcgtaccaaacacgcagtgaccgaagcatctccgatggttaaagcgaaagacgagcgccgtgagcgtcgcgatgatttcgcaaacgaaaccgcagatgattctgatgctggggattctgaagagtaatttctgatgaccaaccgtctggtgttgtccggcaccgtgtgcaggaccccccttcgaaaggtcagcccatcaggaattccgcattgccagttcgtgcttgagcatcgttctgtgcaagaggaagccgggtttcaccggcaggcgtggtgccaaatgcccgtaattattagcggacacgaaaaccaggccattactcacagtttaacggtcggtagcgcagtaatcgttcaggggttcatttcttgccacaaggcaaagaacggcctgagcaaaatggttctgcatgccgagcagattgatttgatagattctggagactagccatatggcacgttatttccgtcgtcgcaagttctgccgtttcaccgcggaaggcgttcaagagatcgactataaagatatcgcaacgctgaaaaactacatcaccgaaagcggtaagattgtcccaagccgtatcaccggtactcgtgcaaaatatcagcgtcagctggctcgcgctatcaaacgcgctcgctacctgtctctgctgccgtacactgatcgtcatcagtaatcgggcacggtccattaatacgactttaagaggataaggtaatgcaagttattctgcttgataaagtagcaaacctgggcagcctgggtgatcaggtaaacgttaaagcgggttacgctcgtaacttcctggttccacagggtaaagctgttccagctactaagaaaaacgtagagtttttcgaagcacgtcgtgctgaactggaagccaaactggctgacgttctggcggctgctaacgctcgcgctgaagcaatcaacgcactgggcaccgttactatcgcgtctaaagctggcgacgaaggtaaactgttcggttccatcggtacccgcgatatcgctgatgcagttactgcggcaggcgttaaagtggctaagagcgaagttcgtatgccgaacggcgttctgcgtaccactggtgagcacgaagttgacttccaggttcacagcgaagtgttcgctaaactggttgttaacgtagtagctgagtaattttttactctgctcgcgtcgaagcgccggccttgtgccggcgttttgctttttagcgtgaccctgcgtcatcttttgctcttgtaaggtcgctattcctgacgcattctctgataataaattgaaacgcaattttatttatgagatttgtcatggatactgctctgcccacgcccgtctttgcccgtcgcaatgtggcctatgcctgcgccacgctctgctgtctgctttggggaagctcgtacccggccattaaaagtggctacgaactctttcagatcgcgaccgatgatatcccctccaaagtcgtctttgccggataccgttttctgtttgctggcgcgttgctgctgctttttgccctggcccagcgaaaaccgattggcaggctcacgcccacgcagtttggccagctcacgatcctcggactgacccagacctccctccagtacaccttcttttatatcggcctggcctacacgaccggggtgaacggctccatcatgaatgccaccgggaccttcttcagcgtgctgctggcgcactttatctaccacaacgacaaactcagctataacaaaacgctggggtgtgttctgggctttgccggggtgatgctggtgaacttccacagcgggttaagtgagttccagtttgtctggaaaggtgacggatttgtggtgctggccgcctttattctctctgcggccacgctttacgggaaacgcatttcccagaccgttgacccgacggtgatgactggctggcagctggggataggcggggcggcactggttgcgggaggctatgccacggnnnnnnnnnnnnnnnnnnnnnnnnnnnnnnnnnnnnnnnnnnnnnnnnnnnnnnnnnnnnnnnnnnnnnnnnnnnnnnnnnnnnnnnnnnnnnnnnnnnnnnnnnnnnnnnnnnnnnnnnnnnnnnnnnnnnnnnnnnnnnnnnnnnnnnnnnnnnnnnnnnnnnnnnnnnnnnnnnnnnnnnnnnnnnnnnnnnnnnnnnnnnnnnnnnnnnnnnnnnnnnnnnnnnnnnnnnnnnnnnnnnnnnnnnnnnnnnnnnnnnnnnnnnnnnnnnnnnnnnnnnnnnnnnnnnnnnnnnnnnnnnnnnnnnnnnnnnnnnnnnnnnnnnnnnnnnnnnnnnnnnnnnnnnnnnnnnnnnnnnnnnnnnnnnnnnnnnnnnnnnnnnnnnnnnnnnnnnnnnnnnnnnnnnnnnnnnnnnnnnnnnnnnnnnnnnnnnnnnnnnnnnnnnnnnnnnnnnnnnnnnnnnnnnnnnnnnnnnnnnnnnnnnnnnnnnnnnnaaatacgcgattgcgctggtgctggtctgctcggggatctggtgggtgaataaacggcgtgcctgagaacacaagtgccgggcggcggcttcgccttacccggcctgggtcattaacgtgctctgatgaaactgccgtccggctggcgggtaaacagtacctgctgcccgtttccggtatcgatcgttagcccggtcaccaccccgctggcattctggcggatctgcaccatctgaccattttgcaggttgctgagcggtttgcctgccccctcgacttgcgccatggcatacacatccgttgctggcagattgtggtcgcggaacagctgggcaagagttttccctggctctacgcgatacgaacgccactgctgctcaatgccggtgggctgttgcgcctgtggctctgaaggggcggcggcctgctcctgatcttcctgaacaggttcaggttcaaccggcgcaacctggcccggatcgttagacggtgtgaccagctgcgtctgcatcggctgtgaatcaggctgcggctggctttgcgactggatatccagctctgcattccggctgaccggcgcggtatcaacgttgtcactgccggaaggaagcaggaagccgatgacaatcagcaacgcgccgataataatgcctctgcggtgcaaaggcggcagcgggtccatgatgcgaaagttatccggcgcatgccagattttcgccagggtaggtttcagttcaaatcgcccgggcatggctctcctcctgctccgcgtctttttatcctgtcctgagaagtgtagtttgctaactgcctgatgggcgtaacaaagccagctttcgtgacatatattagggaaaatcctgacggctactattgtttccgtttcgtcgcagtttgtcacctttacttaagacaaagttttacccataagggcatggctgatatgctgcccgctactttaaatgtgatggaaggaaaacccatgaccaccccgacttttgacactatcgaagcgcaggcaagctacggcatcggcttgcaggtaggacagcagctgagcgaatccggcctggaaggtctgttaccggaagcgctggtggcgggtatcgctgacgcgctggaaggcaagcagcccgctgtgccggttgacgttgtgcaccgtgcgctgcgtgaaatccacgaacgtgctgacgccgtacgtcgcgcgcgtttcgaagagatggcggcagaaggcgtgaaatatctggaagagaaccgtgagcgtgaaggcgtgaacagcaccgagtccggcttgcagttccgcgtaatcaatcagggcgatggcgcaatcccggcgcgtaccgaccacgttcgcgtacactacaccggtaagctgatcgacggtaccgtgttcgacagctccgtcgcgcgtggcgaaccggctgagttcccggtcaacggcgttatcgcaggctggatcgaagccctgaccctgatgccagtaggttccaaatgggaactgactatcccgcacaacctggcttacggcgagcgtggcgctggcgcgtccattccgccattcagcaccctggtgtttgaagtcgagctgctggaaatcctgtaatcggtttttcttattttcctctctccgatcggggagaggaaaatagcgataaaacccggagttacgacggaatcaacattttgtattgcaaacgaaactgttacgtgtatttttgtgagctgtttcgcgctgtatgagtgatatgacactcactttcaacatattattaacataatattcaaatcatagtattcatcccgccgattcttacctactatcgattagtccttacacagggtccgtcatttatttggcgtatataaaggccagaagagccttaacaacacagacaggcataaacaggaaaatatcacatggtagatcaggtcaaagtcgccgccgcagaagaggcgacgtctgaacagtcgctacggcgaaatctcacgaaccgtcacattcagcttattgccattggtggagccatcggcaccgggctgtttatgggctcgggcaaaaccatcagtcttgccggcccgtcgatcatcttcgtttatatgatcatcggttttatgctctttttcgtgatgcgtgcaatgggtgaattgctgctgtcgaatctcgaatacaaatctttcagcgacttcgcgtcagacctgctcggcccgtgggcgggctattttaccggctggacctactggttctgctgggtggttaccggcatggcggatgttgtcgctattacggcctacgcccaattctggttccccggcctgtcggactgggtggcttcgctggcggtgattgttctgctgctgagcctgaacctcgccaccgttaaaatgttcggtgagatggagttctggttcgcgatgatcaaaatcgtcgccatcatcgcgctgattgtcgtcgggctggtgatggtgctgacgcacttccagtcgccaaccggcgtacaggcctcgtttgcccatctgtggaatgacggcggctggttcccgaaaggtatcagcggcttctttgccggcttccagattgcggtgtttgcgtttgtcgggattgagctggtcggtaccacggcggcggaaaccaaagatccggagaaatccctgccgcgtgcgatcaactccattccgctgcgtatcatcatgttctacgtgttcgcgctgatcgtcattatgtccgtgacgccatggagctcggtggtgccaaccaagagcccgttcgtcgagctgttcgtgctggtggggctgcctgctgccgcgagcctgattaacttcgtggtgctgacttctgcggcctcttccgcgaacagcggcgtcttctccaccagccgtatgctgttcggcctggcgcaggagggcgttgctccgagcgcgtttgccaaactgtctaaacgcgcggtaccagcgaaagggctgaccttctcctgcatctgtctgctgggcggtgtggtgatgctctacgtcaacccgagcgtaatcggcgcgttcaccatgatcaccacggtgtcggcgatcctgtttatgttcgtctggaccatcatcctctgctcgtacctggtgtaccgcaagcagcgtccacacctgcacgagaagtcgatctacaagatgccgctgggcaagctgatgtgctgggtgtgcatggcgttcttcgtcttcgtgctggtgctgctgacgctggaagaagatacccgacaggcgctgatggtcacgccgctgtggtttatcgcgctggggctgggctggctgtttatcggtaagaaacgtatggcgggcatgcgctaagcatgttgccgggtggcgctgacgcttacccggcctaggttcgcggatgttgtaggcccggtaagcgctagcgccaccgggcttttttatttacccgataatgcacgcgggaacagaacgttattctcaagactaatgtgttccatcagatcgtcgatcatctcgttaatgccgttgtacatggctttccaggtggtgcacgcttctggcggcggtgtgacgttgttggtggtgtgtttgatcacttccagcagttcgccggcgtcatcatgttcgctttccatcacgctgatgggccccatagcctggctgcccatgccctgtttgatcatcgggaagaggatctgctcctctttcatcatgtggctggaaagttcttcgtgcagcatggtcaggtatttcgccaggccgcgcggtacggaaggtttatcggcatgaacgcgttcaactttggtcgcctgtaaaatcagctccggcagctgctcgcggtgacggtcgtggtaacgcacaatgatgtggtcgatgatttcagccagcggcgcggtgcgccagtctttgtcgacaggctgttcagccagttgagccagctccgcttcgatagcctccacatccagctctttacgcgacgctgcgcgcgccagcgtttgcttaccaccgcagcagtaatccatatcgtatttacggaacagcgcagaagcgcgagggatggagagcgccagctcgcctaagggttggtcgcggaaggccatagcagttacctcatcatcaggaatataagatgtattttaaatacatctttatgtggatactataaccctttagaggcaagggtgaaaatgagaaggggatcacaaaaaaagcgtgcttttaacttgctgattgaatgcagaaaagggctttcgaaagtttttaaaggtggagaaacagtaaacaacctgccgcgcgtgccgatagatacaggtcagacaatacctgtatataaaaaaggcaacgcatgtttaaacgtataaaagtcattactcttttgatttcggtgctgcttgtgctcggcatcatgcagctgatctccgctggcattttcattaacgcactcaataacgataaagagaacttcaccgtttctcagctttccagccagaacgtcgcggagtttaccgacgcctggatcagcctgaaccaggcgcgcgtcactctcaaccgcggcatgttgcgcctgcaaagcagcatggcgtcgcagattaacggcggacagctgaacgagctggtcaataccgcgaaaaacctgctggccgatgcccagatccattacgataaatactacgcgctgccggaaacgccgggtatggacgagcacctggccgatcgtctggaagagcaataccgcgtctactccgccacgctgacgcaaatgaacgttctgctggggcagggcaatctggaagatatgttcaaacaaaatgccgaacagaagcagaccgcgatgcaaaaggtttatcgcgagtggcgtgaggcgcaggccgcgctgaccgccaaagggatccgggacaatgaaagcgactacaaacgcattctgtggatcctttctgcggtgatgctgctggtgatcgcggtgattatttccagctggattgcgatgcgccgcgtgctgctgctgccgctggaagaggtgatcaaccatatccgcgccattgccgcaggggatttaacccagccgattcaggctgagggtaaaaatgaaatggcgatcctggcgcgcaacgttcaggagatgcagactgcgctggccaacacggtgggcgtggtgcgtgaaggcgcagataccatctacaccggcgcgggtgaaatctcggcgggcagcaacgatctctcctctcgtaccgagcaacaggccgcttctctggaagagacggcagccagcatggaacagttaaccgccaccgtgaagcaaaacgccgataacgcgcgtcaggcgtcgcgtctggcgctggacgcctcctccaccgcgaagaagggcggtaacgtggtcgagggcgttgtgcgcaccatggacgaaatcgccaccagttccagcaaaatcgcgcaaattactaacgtgatcgacggcattgctttccagaccaatattctggcgctgaacgcggcggtagaagcggcgcgcgcgggcgagcagggacgtggcttcgcggttgtcgcgggcgaggtgcgtacccttgcccagcgcagcgcacaggcggcgaaagagatcaaagcgctgatcgatgattccggcgaacgcgtcaacgcgggttctcagctggtaaatgaagcgggcgcgacgatggcggagatcgtcaatgcggttacgcgcgtgacggacatcatgggtgagattgcgtcggcctccgacgaacagagccgcggtatcgaccaggtgggtcaggcggtggcggagatggatcgcgtcacccagcagaacgcctcgctggtggaagagtctgcggcggcagcggcggcgctggaagatcaggctgcacgcctgaacgacgcggtggcggtgtttaagatcacccgtaaccaggcggtgaaagccgcgccggtaaagacctatgcacctaaagcgcagcccgtcgcggcggcgtctgaagcgaactgggaaacgttctgatactgtgccgggtggcgctgacgcttacccggcctacggtttgtaggccctgcaagcgaagcgccgctgggcgaaaagctcacccctccgacgccggaacgaccatcggtttttccggcttcgctctcaccgcaatcaccaccccaacgaccagcagcgcgatcccgcaggccgttagcagcggcggcacgctctgacgcatcaggaaggtatagagcagccctgccagcgtctcaaagacaatcagcggccccagtatcaccgtcggcagcttctggctggcaatgttccagcacagcgcccccacccacgaacagagcacggcaatggcgaccattaacccgacgaatacccacgggcgcggtccgaagggcagggtaaatgccggttgctggctacccagccagacacacgcgcccacatagcccagcaacgagacagggagggtgaccagcgcctgcgccgtcgcccacatcatcggatgtttatccgggttttcccgcagccagcgtgcgttgcgcagggcataccaggcccaacagacaaccgagataaacgccagaaagatccctgaaccgtaacgccacaagctgaagttttcgaggccgtggcgaagctcggcaatattcacgcacaccagccccacggcaatgcagaccagcgccggcgccatttttgaccacgccagtttgccgtcacgctggctgtaaagcaggttcgcgaaaaccgggatgaccaccggcagcgtgccgataatcatggtggacaccggcgcaccggtgcgctgaatggcgctcgccagacagacgtagtagatcagattacccatcatggtcagcgccagcgcggtgagccagtccttgcggcccagctgacgcagacgcgcgcgccccagccacgccagcggcacggcaatcagccccagcgccaggtaacgtccggtcgactgcaaaattgccgggtactccggcacaatcagcgggccgacaaaaatcagcccccacatcaaacccgcaagcagggcatacaacacgccgctaatcatttttccatccatcttgattcactttgcgatcagtataggagggcaaaacgcgcgcgtattgtatgaggttgcgcattagcgcggcataacctgtttctggtagcgcacgggcgtgatgccgtagcgacgggtgaaggcgcgggttaaatgcgactgatcggtcagcccggtcgcggcggccacctcggcggcaggcatgccgtgggtgaggaatgcttttgcgcgccacagccggatggccatcagcatctggtggggcgtaacgtggaaatgggctttgaactggcgctgaaaatggtacgggctgagcgagacaacgttagccagctcgtccagggtcagcgagcgcatatagttgtcgtgcagatagtcgcgaacgcgttcgaagcggtgcgcggcctcctgcaccaccggcgcatgatgggccagtggctgaaaagtctgaatcaaatccagtagcagccccttctgcgccagcggatcgttggtgtgccacaggccgtaaattaaccggccaatctgctgcgagcgcaaagggtcgtggcgcgtgacgtcattaaaccaccagtgacgcaggccggtgacctcttccagcaggtcgggttcgatgtagaccattcggtagcgccagccgccttcggtggcggattcccctgtgtggatctcgtccgggttcatggtcacgacggatttttccgcggcaagatgctgggtaccgcgatagcggaagcgttcggcaccggtttcgatggtgccgataccgaaggcttcatgagtgtgaggctcaaaggcgtagtcagagatatgggcgtgataaagctccaggcccggcaactgcgccagatggcgaaagcgcgcgctgtctctctcatcagtgaactgttccggtacgccttgcacggtgagcctccttgtgggtcatcgcttcattatcagagatgacccgaggggatgccacaaaaaataaccaatttttaacaactacaggatggctttgacgctttccgccagtgatgtggttgggtggccgatcagtttgctcagggtacggctgtcgtcgaacaggccgcctttggacgcgccggtgtcggagtccgccagcatctccgccagcccggcaggcagaccaacgcccttcagcgcagcggcgaaatcggcttcgctgaggttctgatacgttaccggcttaccgctctgcttgctcagttccgcagctagttcgctcagcgtccaggcattatcacccgccagttcatacaccttgccggcatgaccctcttcagaaatcactttcgctgccgccgccgcgtaatccgcacgggtcgcagaggcaattttgccttcgcctgcggcacccataaatacgccgtgttccagcgctggcggcgcgcttgccaggtagttttcggtgtaccagccgttgcgcagcagagcgtaaggcacgccggaggccgccagggcattttcggtttcgacgtgctcaacgtgcagacccagcggagatttgtcagcatgcagcaggctggtataggcgatgaatttcaccccggcggctttggcggcgtttatcacgttctggtgctgtacggcgcgctgacccacttcgctggaggagatgagcagcagtttatccacgccgttcagcgcggtggtaaatgcggcttcatcggtgtaatccgcctggcgcacaacgaccccttgctgacgcaacgcttcggctttcgccgggttacgcacaatagccacgatctggctggccggaacggttttcagcaattcttcaataacgtgttggccaagctggccggttgcgccggtaatcgcgatcatgatgaatctccttcgtgtttgtctggtgttgtggcacactatcaccataactaacttttagtaagtacgtacaaaaaggtaagtatgaaaacaacaataccaacgctcagcgagcaaatgcgcgatggcaacctctttgcggaacagtgcccgtcacgggaggtgctcaaacacgtaaccagccgctggggcgtgctgatcctggtggcgttacgtcaggggacgcatcgcttcagcgatctgcgccgcaagatgggcggcgtcagcgagaagatgctggctcagtctttacaggcgctggagcatgacgggtttgtcgatcgcgtgtcgtatccggtcgtgccgccgcatgtggagtatagcctgacgccgctggggcgggaggtaagcgagaaggtggccgcgctggccgactggattgaggtcaatacgccgcaggtgatggcgaatagggacgagcgtgcggcgtgaaatgccgggtagcgcttgcgcttacccggcctacgggattgaggattgcgggtaggccgggtaaggcgaagccgccacccggcacaatcatcgctacctgctcaaatccacctgataaatcgcgaacccaatatcatccgtcgcgaccttttgcatcggatactgcgccttatccttgataaacgcggctgctttatcggacggagatgtctcaaagcgaatatccagcttagtgtcgctgtggatcggcgcaagtcgccagttgttatccaccgccggatgaatttcacccgtctttttcgactccgcgctgatccacgccgccagcaccgaacggttctcatccggcgaggcaaaggcgatgtggctgtcacccgtaccggcaaacttgccgccataggcgcggtagttgttggtcaccaccaggaaagtggtattcggatcaatcgctttgccgttgaaggtcaggtttttgatacgttctgcctgcggattaatggcctgacattcgccgtcatatttcgcgggctgggtgacgtcaatctgatattccacgccgtcgatcacgtcgaagttgtaggtgcggaaaccgtcccagttaatcagcgactgcggtttgctgctgtgcggatcgatctggttgaactgcccggcagagcactccagccactccttcacctctttcccggtagctttcaccaccacgagggtgttgggatagaggtagagatcggcggcattacggaaggtcagttggcctttttccacctcaacgtagctggccggatcgttcttccgcccgcccactttgaatggcgccgcggcagacagtaccggcagatttgccatatccggatcgccctgaatatagtgctccgcataggctttctgcgccatgttgactacctgcacggtcgggtcatcctgtaccagcgcgaggaagctgtacatgttatcagccgatttaccgatcggcttgctgacaaattcacgcgtcgcgtcgtggtcatgcttcaggacgtcgaccagctttttatcttcccctgccagagattttttggccgctgcgtcgtagatcggacgcgcttccgctttcgactgcgtgactttccagcttccgctgtcgttattcagcaccagatccaccacgccaaggtggtcgccccacatgcccggcatcaccgatgacacaccgttgagcgtccctttttcgatgtccgcgcctttgatatcagcgaaatctttgcccgggaagacggcgtgggcgtgtccaaacaggatcgcatccacgcccggcacctggctgagatagtacacggagttctcagccatcacctgatacgggtcggccgagaggccagnnnnnnnnnnnnnnnnnnnnnnnnnnnnnnnnnnnnnnnnnnnnnnnnnnnnnnnnnnnnnnnnnnnnnnnnnnnnnnnnnnnnnnnnnnnnnnnnnnnnnnnnnnnnnnnnnnnnnnnnnnnnnnnnnnnnnnnnnnnnnnnnnnnnnnnnnnnnnnnnnnnnnnnnnnnnnnnnnnnnnnnnnnnnnnnnnnnnnnnnnnnnnnnnnnnnnnnnnnnnnnnnnnnnnnnnnnnnnnnnnnnnnnnnnnnnnnnnnnnnnnnnnnnnnnnnnnnnnnnnnnnnnnnnnnnnnnnnnnnnnnnnnnnnnnnnnnnnnnnnnnnnnnnnnnnnnnnnnnnnnnnnnnnnnnnnnnnnnnnnnnnnnnnnnnnnnnnnnnnnnnnnnnnnnnnnnnnnnnnnnnnnnnnnnnnnnnnnnnnnnnnnnnnnnnnnnnnnnnnnnnnnnnnnnnnnnnnnnnnnnnnnnnnnnnnnnnnnnnnnnnnnnnnnnnnnnnnnnnnnnnnnnnnnnnnnnnnnnnnnnnncgtatttgcgcgcggtttcggtaatgtcgttgacggtcactttcccgtcgaggttggctttatcccacgtcatgatctgcggcggcacaaaaccgatatagccgattttcagcgtctgttttttaccgtcctggtcgacaacctcggtctctttaatcagataaggggtgaagagcggcttcttcgtcttaacgtcgatgatattggcgttaacgtacgggaattttgcacctgccagcgcgtcgtgcaggtatttcaggccgtagttaaattcgtggttgcccaggttgccgacggtatagtccagcgtattcattgccttataaacaggatggatctcgccttttttcagccccttcgccgccatgtagtcgccgagcggactgccctgaattaagtccccgttatcgaccagcacgctgtttttcacttcaccgcgggcggcgttgatcaaacttgccgtgcgtaccagtccgaatttttccgtaggggtatctttgtagtaatcgaagtccatcatattgctgtgcagatcggtggtttccagaatacggagatccaccgtcgctgcctgaacgcttgccgcaatcagcgttgccaggagcgttgcgctaaacttaatcatctgaggagtccttttttcgatccaagccacaaaagaatatgtatgtagtatttgttgcttacagaagtgtgaatgctgccagaaaaaagggtgctgaaaccagaattgcttcacagatagcggaattgttcacattacgatataactaaaacaataagttatgcccactgcgttaacgaagaggtggagaatgttagataaaatttgtcagctcgcacgggatgcgggtgatgccattatgcaggtgtacgacggtgcgaaaccgatggatgttgtcagcaaagcggatgactccccggtgacggcggcggatatcgcggcgcatgcggtgatcctgaaaggtttgcaggccctgacgccggatattccggtcctttctgaagaagcgccccagagctgggatgaacgtcagcactggcagcgttactggcttgtcgacccgctggacggcacgaaagagtttatcaagcgtaacggtgaattcaccgtcaacatcgccctgattgaaaaaggaaaagcggtgcttggcgtggtttacgccccggtgatgaaggtgatgtacagcgcggcggaaggtaaagcctggaaggaagagtgcggcgtgcgtaagcagatccaggtgcgtgatgcccgtcctccgctggtggtgatcagccgctcgcacagtgacagcgagctggaggagtacctgcaacagctgggggaacaccagacgacgtcgattggctcgtcgctgaagttctgtctggtggcggaagggcaggcgcagctgtacccccgtttcgggccgacgaacgtctgggatacggcggcagggcatgcggtggcggcggcggctggcgcgcatgtgcatgactggcagggtaagccactggactacaccccgcgcgagtcattcctgaatccgggcttccgggtgtcactttactgagtcagcagcttatgcagcagggcaaccacctgctgcacctcatcctgcgtcagcgcgccgtccttaacccactgtacgcgaccgtttttatccagcacgacaatcgctgaactctcctcttccagctgccacgccttacgcgtcatgccattgctgtcgacaataaactgcgaccagggatagagcttcttattgctctcaaggcttgagcgcacaaacatcccggagccgggaatcgcgtcgtcggtgttcacgatggtggtggtctggtagcgatcgtgcgggagttttgcggccttgatcgcttccacgagggtagcgtttttctctttagcggatgtacgcccggcaatatgttgtacaactctcactttgcccgcaagctgcgcgctattccaggctttatagctaaacttatcattgtcgagaatcaattctccccggtcagcaatcccgaccggcgggacacgttgtcctttttcaatgttgtgtgcggaagccatcagcggcagcaacaggcaagctgctgccaggaggttacgtagggtcatggtgtttccttattgttagcaggtgatccgaccacttggtcatgcgcttttaatcataagtgcgatcaataggcttttcccgcaatcccgatgccagtttgcgggcgaacgcacatatccatgcaaaaacgacggcatatactgcgctgtatcacgctttgcaaagattattctgaataattgtaatcaaacggtaaataaacttatgcacactgggtaagtacgaggttctggtctatagtcattgggcatcaaaatttgcgctcaggacagtcgggccgattgtggcaccgcaagagcgtatgattcgcaggagatacaagaatgaaaattttccaacgctacaacccgcttcaggtggcgaagtacgtgaagatcctgttccgtggacggttgtacatcaaggatgttggcgcttttgagttcgataagggcaaaatccttatcccaaaagtgaaggacaaacagcacttgtctgtgatgtccgaagtcaaccgtcaggttatgcgtctgcaaactgagatggcttaaccaacgtgctatgcagtagtagttaaaaagacggctcccgatgggagccgttgatgtttgtgggacatacaaaggattacgccgacaccttctcttccgcatccggcagtttcggcaccagcacggtcggtttgctatcaatacgcgttaccagcagctggtcgatgcggtagttatcaatatccaccacttcaaacttgaagccggagaacttcaccgagtcggtacgtttcgggattttacgcagcataaacatcataaagccgccgatggtctcgtagttgccggactgcgggaactcgtcaatgtcgagtacgcgcatgacgtcttcaatcggcgtaccgccatcgatgagccatgaattttcgtcacgctgaacaatctgctcttccagcccctggccgaccaggtcgcccatcagggtcgtcataacgtcgttgagggtgataatgcccaccaccagcgcgtattcgttcatgatcaccgcgaagtcttccccggcggttttgaaactttccagcgcttcggagagcgtcagggtgtccggcactatcagggtgttgcggatctgcacgccgctgttcagcgccaggctctggtttgccagcacgcggtttagcaggtctttggagtccacatagccgatgatatggtcgatatcttcgttacagaccaggaacttggagtgcggatgctgcgccactttggtcttcaggctctgctcgtcttcatgcagatcgaaccagatgatgttttcacggccggtcatggaggacggcacggtacgggattccagttcgaaaacgttctcaatcagctcgtgctcctgcttacgcagcacgcctgccagcgccccggcttccaccaccgcataaatatcgtcggaggtgatgtcgtctttacgcaccatcggcagcttgaagatgcggaaaatgacgttcgccaggccgttaaagaaccacaccagcggacggaagacatacaggcagaagcgcatcgggttgatgatacgcaaagccacagcttctggcgcaatcataccgatgcgtttcggggtcaggtccgcgaataaaatgaacaagccggtgaccagggagaaggagaggatgaagctcaactgctcggccagctctacggacatgtacttaacaaagaggctataaaacgccggagaaaacgctgcatcgcccacgataccgccaaggatggcgaccgcgttcaggccaatctgcaccacggtaaagaacatgccggggttttcctgcattttcagaatgcgtgatgcgttgatgttgccctcgtcggcaagcagcttcagtttgattttacgggaggcagccagcgagatctccgatatcgagaaaaatgcactgacggcaataagacaaagtattactaaaatactgtttaacatagtttatccggcttctcgccagatcctcagaaggggagttgataccattcgtgtgaagacacattgaactcagctcgtagcgttgagccgattatttcagcggtagtatagcgtaaagacgtgtaaacctgccagaggtcacgttttcggcaaaaaaagccggaccggcatggggccgaaccggcgggaagggctatttcacggtggataagttttcgcccacagccaggcgtgtggcatcgccgccccagacctgatcgtactcatagcctgtcagctgtttgatgaccacgcgggtgctggcgtcgcagtcgcgatagtcgccaccgagcttccgacgcgcgatctccttgagcagcaccttatgcgtctcgcgggtcagcttaaatttgtaggtcgcgaagaagctcactgccagcagcgcggcggtggcaaaaatcatcaggccaattattgctcccagcgcgctttcaggctgtgcgccactgcctttcacaaaaccggactcctgcaacaccaggccgataatcataatcgcaatggcgacggtgcttttgcgggtcaacaccattacgccagcgaaaatgccttcccggcgctgctgcgtgacgatctcgtcgatatccggaataaagctataaatattccacggaatgtaatagaggccggaacgggctgcacccagcaggatgaagacggcggagaacagcagcgttggcacctnnnnnnnnnnnnnnnnnnnnnnnnnnnnnnnnnnnnnnnnnnnnnnnnnnnnnnnnnnnnnnnnnnnnnnnnnnnnnnnnnnnnnnnnnnnnnnnnnnnnnnnnnnnnnnnnnnnnnnnnnnnnnnnnnnnnnnnnnnnnnnnnnnnnnnnnnnnnnnnnnnnnnnnnnnnnnnnnnnnnnnnnnnnnnnnnnnnnnnnnnnnnnnnnnnnnnnnnnnnnnnnnnnnnnnnnnnnnnnnnnnnnnnnnnnnnnnnnnnnnnnnnnnaatgccagcaccaggaaaatgcagctatacgaaaggcgcagtgcggcggaaggggtcatgttcagcctgttgagtaacagcataaatccgtacgtgccgggcacggaggcaaaagccgcaatacttagccagccggacactgctgccgcatcctgactcaggcaatacaccacgtaataggtaaagactgaaccaaatacgtccatcgcggtgaaggagaaaatataaataagaatatgcaggcggaaagcgcgaatacgaaaagaagagaagagatccagcaccagatatttgaggtgattaattactccgctgctgcgctgggtatcaactttgaagtcatactcctgatgcacatcttttgcttcccaggtgctgtaccaggtaataaataccgcgatgcaaaagacgcaggaaaatatcagtccggttagcgtgtaggtaaaggaattatctttgccggtaaattgcataatcacgcccggaaccgacaccgcaagaaaaccgcccaattgcgagcagatcatccgtacgcccgacaggcggctgcgctcttcatagcggttggtcatctccgcggcgagggtttcccacggcaccagcaccatcgctgaaagcagttcgatggaaagataggtgcccaggtaataccagtaacccatgtccgtcagccacagcagagcatagaggaacattaagggagagctgagtaataagaagaaacggcgacggccaaatttacgcccaagccaggtgtcgccgaaattgtcggtgatgtaacccattatcgggcttaataccgcgtcaatgacgcgggcaatagcaaatatagagccggcttccacgacggataatccgcaataggtggtgtaaaaaaataacagccaggtgccgataatggcgaaagcgcctccgccaaagaggtcggttatgccgtagccaagcgccacgccataacccactctgcgttcagttggtttaaccataataatatccagtgtagggtagatgtagaggttgtatttttattgcactgctggactacacgtgacgttctaattattaatatctatccattgtcttaactgagatgaccgataaaaagcctccacaatcttgagtgattttccggcggtacaaatatcggtaaaatccgtactctccgggtgatgaatagcgtgataaaaacggcggatcgcctgctggtgtcctaatccccagtaactttttgcgatgccatcgggagaggcatcgctttccaggcgaaatcgttcgccgggcgttatgcgccagagcgtgttgtcgttgagcagcagtgagccgcgctcgcagtggatctccagacagaggggggaatccgtggtgtggcagttgctggcataaaacagaccgcgcgcaccgttggtaaagtgaagcgtggccatcgcgctgtcttccccttgcgtgacgtcagccagttccccgctgtcgactacccccttcagccgcgtgacgccacccgcaaaccactgcatcagatcgagggtatggatcgcctggttgattagcaggcttccaccttccgttgccagctgcccgcgccacgggctttccgtgtaatacgcccccgagcgggaccaggtcagcacagctttgatacttaacatctttcccagtacgccttccgccagctccttgcgaatgcgcaggctggtcggattgagccggttctggtagcagacgccgagcctgccgggtgcctgcgcggcggcagaggcaatgtcggcaagctcgctgctgttcatgcccaccggtttttcgcaaaagacatgtttcccggcggccagcgccgccagaatcatgtttttgtgctcgaagtggggcgtgcagatatgcaccacgtcgatgctgtcatccagcagcatttcccggtaatcctgataaaagcggcactgatagttcatagccagcttcagtcctttgacgctgtcgatatcgaccagcgcgcgcagcgcgacattggggatttgcctcagggcattcacatggcaactgtgaatagccccggcaccgataatcgccgtgttcaggatgttcatgtcgtccccttagtcagctgcgtttgcgagcatttgtgctttcacgcacagttcggcagctttgaaagcatgcgcctgagtcatggcattttcggtgcggtgcaggcagtcgaggatcagttcgccaaagtacgggaacccaacctgcccggccacaggatagcggaactcgccctcgttattgacgaggtagacgacatcctgctcaccccgggtgagatcgacatatttacggatctcgatatacccgtcggtaccgagcagcgtcaggcgaccatcgccccaggtggagagcccgtcaggagtgaaccagtcacaacggaaatagccgctggcgccgttttctcctttgagcatggcgtcgccaaaatcttcgaatgcgggatactgcgggtggttaacgttgcgcacctggctggcgaccacggtggcgtcgcggttgccggtataaaacaggaactgctcgatctggtggctgccgatgtcgcaaaggatgccgccgaaatagcgacgatcgtagaaccagtccgggcggccagtcccttcccggtgcggccccatgcccagggtttgcaccacgcgaccaatggcgccttgctgtaccagctgcccggcaaagaccgcgctttccacgtgcagacgctcgctgtagtagaccgcgtattttttcccggttttctccaccatcgctttggcgtctgccagctgttcaagggtggtgagcggcgctttgtccgtgaagtagtctttaccagccgtcatcgtcttcagccccagcgcacagcgttcggaggggatggccgccccggccaccaggcgcacgtcgtcatcggcgagaataacgtccagggaatcagccaccttcacctgcgggtactgctgaacaaacgtgtccactttcgccggatcgggatcgtaaacccacttcagcgtggcacctgcttcaatcaggccattacacattccgtagatatggccgtggtcgagcgcggcggcggcaaatacaaattcacccgcctgcaccaccggctgcggtttgcccaccggcgcgtagttcattccgtcattcttgttcatggttacagtcctcgatccagatctttacccagagggatagcgcccacttcgctgaagttggcgacgcttgcggatttttcataaaaacggggggcgagggcgttcgtcccgccggtacggtaaaacggatcatcgcggccaacaggcagggaaacgacactgcgggtaatggctgatttatacatcgcagtaatcagctccagcgagcgcttaccctgcacgccgtccaccagcggggccgtaccgcgctcaatgctctgaagcaggtcgttaatctgcccggtgtgcagagtccattcgagcctgggcgtcgcctggaaaacggcatcaagcagggcttctcgctcaatatcgttggtctcctgcgggaagccgttgtcagcactcacgctggcataagcctgccatggggcggagatgcgcgctttatcaccctggataatgatcttctgatcttccccgtggtgtactaccgaggcggtaagctgggtgagtgcgccgctggggtatttgaatatcgcggcgctaaggtcttccacttcggcgttgtcatgggccacgttggtcatcatcgccaccacctcagacgggaagccgagcatccactgaatggcgtcaatatggtgcaccgcgtggttcagcgtgcagccgcccccttccttttcccacgtgccgcgccaccacaggtcgtagtagcaatgtccgcgccaccagaaggaatccacctgcgcatggcatatttttccggcgaggccggaatccagcgccgcttttaagcgccagaaggcatcggtaaagcggttctgggcaataatggagagcgtttttccgctggcctgctgggcggcgatcatcgcatcacactcctccagcgaggcggccatcggttttcacacagcacatggcagccggcatgaagcgcatcaatgctgatctccgcatggacatagggcggggtgcagacgtcaacgatatcgatgggaagcgcatcctccagcaactgccggtggctggcgtacacgcgggcgtccgtcaggccgtaacgcgcttttttctcttccgctttctcgggatagatatcaaccagcgcaacgatccggcagcgctgtccaaactgcaaataaccctgaatatggttatgggagatatttcctgttcccacaatggcgacatttaacatcgattttctccggtgttaccaggtacccgcggcatccagcgtgatgctggtggcccctttatctacagaggtgctgatgcgctgctgaagcaggcgcaggtattgcttttcgtttagcggtagctcaacccagtcgtccgtccaggtggagaggtgcatggcgttagagagggttaaaccgcgaatgccgtccagacccggtgcaatcaacggctcgccgcgcagcacggcggcgcagaagttggcggtgatgacgtggtgctcgctgtattccggggctacagggacagaaacctcccagcattccggctcaccgaagccattctgccagcgagcgttaaactcggtttccgattcgcgcagccgccagtagcgcagtttgccctcgtcgacgaccactttgccgcgatcgccgacaatctccaggcggttggtacctggtgtttccgcgacggtggtgatgaacacgccggtcgcgccactggcatattcggcgtaggctgtcacctcgtcttccacttcgatatcgcgatgcttaccgaactggcaaaacgcgcgcagacgaaccggcatgcccaccagccactgccagagatcgagctggtgcgggtcctggttgagcagcacgccgccgccttcccctttccaggtggcgcgccagccgccggagttgtagtaactctgcgagcgataccagttggtgatgatccagttggagcggcggatctcgcccagctcgccgctgtcgatcagatctttcactttctgatacagcgggttgggccgctggttatacatgatgccgaacaccacgtcgcactcccgggcgcaggcgttcatctcctggacctgcgcggtgtagacgcctgctggcttctcacacagggtatgaatgccgtggcgcatcgccagcatcgacaggtgcgggtgatcgtaatgcggcgtggcgacaatgaccgcatcgataagcccgctctggagcatctcctgcgcatcactgaacagcggaatgccaccaaccagctgccgaatggccggatgcttttccggcgcgttatcgcacaccgccgtaaggcaggcgtcgctgacggttccggccagtaaatagcgtgcgtggaccgtaccgatattacctataccaataatgccaaaacgtaccttctccatttctcaccttaatttcagtcaaaaagcgtgatgaccgaaaaataggaaaggcgagacgtagcgacaatgtgtttttgtgagaatactcgcaaggtgaataagtaaactccaaccattttgaaatttggttttaaaatcaaagcgctgtttctgcaaatatttgcaaaaactgattgagagcgaggtcacactatgccgggcaagttaaaaatggaggagatcgcatccctgacgggatattccgtgagcacggtttccagggtgttgagcggcaagtcttataccagcgataaggcccgggaagccattgtccgcaccgcgcgggagcttggcgtgctggagtcgatggcgagcggacggcttttaattaacggaatcgctgtatttgcgcctgaaagaacgtttcagggtcgtggggatattttttatctggaagtgaccaaaggcattgcggaagccagcgcgccacataatgtctggatcagttattgcggattagaggaacagaatgcggacgtgaaattatttatggaaaaggcaagccataaaaatattaatgcaataattatcattggtacggatgattccaccatatttaagctggccagcacgctgaataaaccctgtgtattaattaattccgtcgaccgggaccgggtgctggattcggtttcgcccgatcatcgcgcaatcggctttaccacgatgcaatatcttttcgagcaggggcatcgccgggtgctgaccatcacctgtttacgccgggacacgctctatgcccggctggatggaattaaagaagcgtaccggcattttcatgtggcgtttgagccgcagcgggatttactggtcacggagtggtttaccgctgaagaggctgagcgcgagctggatgcgtggctgttacgtcacgacagagcgcagtggcctgaggtcatttttcccaacagcaccagcatgaccgagggtgtgctgaaggcgttacagcggcatgggctgcgcgtgccggaagacatctccatcatcaccaccgattttgcgtggaatttagcaaaccggcttgaaaagcccattacggggatcacggtgccctgtcgggatttgggtatagaagcggtgcatttgctgcaaacgcggctcaaccgaccacaggcgccagtgtttaacctgctgttgcaggggaaagtcattgattacggttcggtgagtaatgccacgcgccacgcggctcgcgtggcgctgatgcagtaatcaggcctgctggggaggcaggcaaacgccaatgccgccgataccgcagtagccgtacggatttttatgcaggtactgctggtggtcgtcttcggcatagtagaacggtttcgcggtcgcgatttccgtcgtgacctgacgtttatcaccggccgcctgcatcgcttcctggaaacgcgtcaggctggcgtgggcggcggcctcctgctctggggtgagcgggtagatggccgaacggtattgggtgccgtgatcgttaccctgacgcatgccctgcgccgggtcatggttttcccagaacacctggagcagctgttcatagctaatgacgctcgggtcatacaccacacgcaccgcttcagcatgaccggtctcaccggaacagacttcgcggtaggttgggttaggcgtatatcctccggtgtagcccgcagcggtgctgtacacgcccggcagttgccagaacaggcgttctacgccccagaagcagcccatggcaaacagggcgatctccattccatcaggaacgtttgtcattgaatggttgtttacggcgtgtaatgttgccactggcataggggtgttgcgtcccggtaacgcatcggcttgtgataccagatgctttttatcgaataaactcacggtggggcctcccgggtagcgttgtttcggttaaggttgtcacgaagcgtttaattgaacacaataaatgcgatgaatgagtctagatttaatcataagaaatatttgggtgttacaccctttttcaacccgtaatttgggtttttggctttcaggccgtattttgccgcggagcggcactgcatttgcttccagggtggaaacagggatattcaggagaaaacgtgacaaagatccgccagttatgtttagtcagtttaatgctgaccagcgggattgccagcgcggcgaatgtccgtttgcaggttgaggggttatccggggcgctggaaaaaaacgtgcgtgcgcagctttctaccatccagagcgatgaggtcacgccggatcggcgttttcgcgcgcgcgtggatgacgccatccgcgaaggcttaaaggcgttggggtactacgaacccaccatcgatttcgatttacgcccgccgccggcgaaaggacgccaggtgttgattgcccgcgtctcgccgggcgaacccgtcctgattggcggcacgaacgtggtgttgcgcggcggtgcgcgcaccgatcgggactacctggatctgctcagcacccgtccgaaagtgggcaccgtgctcaatcacggggattacgatcgttttaaaaaatccttaaccagcgtttcgctgcgcaaaggctacttcgacagccggttcaacaaaagccagctgggcgttgcgcttgagcgacgtcaggcattctgggatatcgattacgacagcggcgagcgctaccggtttggcgatgtgaccttcgaaggatcgcaaatccgtgacgagtatctgcaaaatctggtgccgtttaaaaagggcgactactaccagtccagcgacctgggcgagctgaaccgtcgtttgtccgcgacgggctggtttaactccgtggtggtagcgccggaatttgataaatcccgtaaaacgaaagtgttaccgctgcatggcgtggtctctccgcgcaccgagaacaccattgagaccggtgtcggctactccacggacgtcggcccgcgcgtgaaagcctcgtggaaaaaaccgtggatgaactcctacggccacagcctgaccaccagcgtcagcctgtctgcgcctgaacagcagctggacttcagctataaaatgccgctgctgaaaaatccgcttgagcaatactacctcgtgcagggcggctttaagcgtaccgatttgaacgataccgagcaggactcgacgacgcttgcggtatcacgcttctgggatctctccagcggctggcagcgcgccattaacctgcgctggagcctcgaccactttacccaggcaaacgtcaccaacaccaccatgctgctttatccgggcgtgatgatcagccgtacccgctcgcgcggtggcctgatgccgacctggggcgattctcagcgctactccatcgattactccaacaccgcctggggctccgacgtagacttctccgtctttcaggcgcaaaacgtctggatccgcacgctgtacgacaaacaccgctttgtgatgcgcggtaatctcggctggatcgaaaccggtgatttcgaacgcgtcccgccggatctgcgcttcttcgccgggggcgaccgcagcattcgcgggtataagtacaaatcgatctcacctgaaaacgacaaaggccagttgaccggggcgtcaaaactggcgactggctcgctggagtaccagtacaacgtcagcggcaagtggtggggagcgatgttcgttgacggcggtgaagcggtgaacgatatccgccgcagcgatttcaaaaccggcgcgggcgtaggcgtgcgctggcagtcaccggtcgggcccatcaagctcgatttcgccgttccggtgggcgacaaagacgaacacggtttacagttttacatcggtctggggcctgaattatgagtttatggaagaagataagcctcggggtgctgatttttatcgtattactgctcggtacggtggcgtttctggtgggcaccaccacgggcctgcatttgctgtttaacgccgcgaaccgctgggtgccggggctggaaatcggccaggtaacgggcggctggcgcgatctgcgcctagaaaaatatccgttatgaacagcccggcgtggcggtgaatgcgggcgagtttcatctggcggtcaagctcggctgcctgcgggacagccagctgtgcgtaaacgatctgtcgctaaaagacgttaacgtggcgatagattccaaaaaaatgccgaagtccgagcctgtcgaagaagaggacagcggcccgctgaacctctccacgccgtacccgattgcgctctaccgggtcgcgctggataacgtcaatatcaaaatcgacgacacgacggtatccgtgatggatttcacctccggtctgcgctggcaggagaaaaacctcaccctgaccccaacctccctgcaagggctgctgattgcgctgccgaaggtggccgacgtggcgcaggaagagatcgtagagccgaagatccagaacccgcagccggaagaaaaaccgctgggcgaaacgctgaaagatctcttctcgaaaccggttctgccggagatgaccgacgtgcatctgccgctgaacctcaatatcgaagagtttaaaggcgagcagttgcgtctgaccggcgataccgatctgacggtcttcaacatgctgcttaaagtcagcagtatcgacggcaacatgaagctcgacgcgctggatattgatactaaccaggggtcggtcaacgcctcaggcaatgcgctactgcgtgacaactggccggtagatattacgctgaacagcgccctgaacatcgatccgctgaaaggcgaaaaggtgaaggtgaaagtcggcggcgcgctgcgcgagaagctggagttcggcgtgaacctctccggaccggtggatatggtgctgcgcgggcaaacccagctggcagaggccggtttaccgctcaaccttgaggttgtcagcaagcagctttactggccgttcaccggcgaaaaacagttccaggctgacgatctgaagctgaagctgagtggcaaaatgaccgactacacgctgtcgttccgcacggcagtgaaggggcagggggtaccgcccgccgatatcaccctggatgcgaagggtaacgagttgcaggttaacctcgacaagctgaccgtggcggcgctggaaggaaaaaccgagctgaccgcgctgctcgactggcagcaggcgatcagctggcgcggcgagctgaagctgaccgggatcaacaccgctaaagaggtcccggactggccgtcaaaactggatggcctgatcaaaacccgcggtagcctgtacggtggcacctggcagatggacgtgccggaactcaagctcaccggcaacgtgaagcagaacaaagtcaacgtagagggctcgcttaagggcaacagctatctccagtgggtgatcccgggcctgcacgtggcgctgggtcgcaacacggcggatatcaaaggcgagctgggcgtgaaagacctcaatctggatgccactatcgacgcgccaaatctcgataacgccctgccgggtcttggcggcacggcgaaggggttagtgaaggttcgcggtacggtggaggcgccgcagctgctggcggacatcaccgccaataacctgcgctggcaggaactttctattgcccgcgtgcgtgtcgagggagacgtgaaatccaccgatcagatcggcggaaacctggagctgcgcgtggagcgtatctctcagccggacgtgaacatcagtctggtcacgctggcggcaaaaggcaacgaaaagcagcacgatctccagctacgggtacagggcgagccggtctctgggcagctgcacctgacgggcagttttgaccgccaggcgacgcgctggaaaggcgtgctggataacacccgcttcagcacgccggtcggcccgctggtgctgtcgcggtctgtcgcgctggattaccgcaacgcggagcaaaagatcagcattgggccacactgctggaccaacccgaatgctgagctgtgcgtgccgcagaccattgatgcaggcgcggaaggacgcgcgcagatcaacctcaaccgtttcgacctggcgatgctgaaaccgtttatgccggaaaccacccaggccagcggggtcttcagcggtaaagcggacgtcgcgtgggacaccaccaaagagggactgccgcagggcagcgttaccctctccgggcgtaacgtgaaggtgacgcaggaggtcaatgacgcgccactgccggtggcgttcgacaccctgaatgtgaacgctgacctgcgtaacaatcgtgcggaactgggatggctgatccgcctgaccaacaacggtcagtttgacggacaggtgcaaattaccgatccgcaagggcggcgcaatctcggcggcaacgtcaatattcgtaacttcaacctggcgatggtgaatccgatcttctcgcggggagaaaaggcggcggggatgctcagcgccaacctgcgtctggcgggggatgcgcaaagcccacagctgtttggccagatgcggttaaacggtgtggacattgacggtaactttatgccgttcgatatgcagccaagccagctgacgatgaactttaacggccaaagctcaaccctcagtggctcagtgttgacgcagcagggacaaatcaacctgagcggtgacgcagactggagccagctcgacaactggcgcgcccgtattgcggccaagggcagcagggtgcgtatcacggtaccgccgatggtgcgcctggacgtgtcgccagacgtggtctttgaggcaacgccgagtctcttcaccctggacggccgtgttgacgtaccgtgggcgcgcatcgtagttcacgaggtgccggaaagcgcggttggcgtctccagtgacgaagttatgctcaatgaaaatctgaaacctgttgaacagaagagcgctggcataccgatcaatagtaatcttatcgtgcacgtggggaataacgtgcgtttggacgcgtttgggctgaaggcgagactcacgggtgacctgaaagtggcgcaggatcaacagggacttggcctcaatggacaaatcaatattcctgaagggcgcttccatgcctacgggcaggatttgattgtgcgtaaaggcgagctgctgttctccggtccaccggatcagccggtactcaatatcgaagcgatccgtaacccggaagccaccgaagatgatgtgattgcaggcgtgcgcgtgacgggctccgccgatgaacctaaggcagagatcttctctgacccggccatgtcgcaacaggaagcgctctcttacctccttcgcggccagggtctggatagccaacagggcgatggtgcggcaatgacatcaatgttagtcggtctgggggttgcacaaagtggtcaggttgtgggtaaaatcggcgagacgtttggcgtaagcaatctggcgctggacactcagggcgtgggtgactcttcgcaggtagtggtcagcggctatgtactgccgggtctacaggtaaaatatggcgtggggatctttgactcactggctacactcacgttacgttatcgcctgatgcctaagctatatctggaagcagtgtccggcgtagaccaggcacttgatctgctctatcagtttgagttttagcaatgcgaatatttgtttacggcagtttacgaaccaggcaaggcaacagccactggatgaccaacgcccagttgctgggaaattacacaatcgaaaactaccagttgtacagtctgggccactatccaggcgcggttccggggaacggaacggtacagggtgaggtttatcgtattgataatgccacgctggccgaacttgatgccttgcgcaccaggggcggtgaatacgctcgccagttgatccagacgccttacggcagtgcatggatgtacgtgtaccaacgttcggtcgacgggttaacgttgattgaaagcggtaactggttagacagagaccagttctgaaaaacgacaacgccaccttacggtggcgttgtcgttttgcgccgtaggcccgtgcaagcgtagcgccgccgggcgatactccccaatcgcacgggttacctggagcgacaggcacaaaaaagccccgacgcgcggggcttagtctcagcagtaagaattacttcttagccgcacgttcgaaggaggcgatgatttctgctttcgccgcttctgcgttatcccagccttcaactttaacccatttgcctttttcgagatctttgtagtgctcgaagaagtgggcgatctgcgctttcagcagctctggcaggtcgttcacatctttaatgtgatcgtactctttgctcagcttggtgtgcggtacggcaaccagtttcgcatcttcacccgcttcgtcagtcattttcagcacgccaacaggacggcagcgaatgacggagcctggctgcaatggatatggcgttgggaccagtacgtcaaccgggtcaccgtccagagacagagtgtggttgatgtagccgtagttgcacggatagaacatggcggtagacatgaaacggtcaacgaacagcgcaccggtgtctttgtcgatttcgtatttgattggatctgcgttggccgggatttcgatcacaacgtagatgtcttctggcagttctttacccgcagggacgttgagtaagctcatgtcggtgtcctttaaaatggatggtaaacaagtggcaggtattatagccaactggcgctgaaagtctccgcctgttttcgtcttctctccctcgcgccttcacttttcagaccgtttccatgacaggataatccataaactcagccgcattttaaatgttgaaatgaaagcgattacaaacttgtgattaacgttttattcacttttctgaagtgtgatgtaacgcaatccgtaacatattccattggctatagttcatccgcggaacatcttttaaccaacaataacctaccctacgaggacgttcatatgtggaagcgcttacttcttgttacagcagtttcggcagccatgtcgtctatggcgatggccgcacccttaaccgttggattttcgcaggtcggatctgaatctggctggcgcgccgctgaaacgaatgtggcgaaaagtgaggccgaaaagcgcggtattacgctgaaaatcgccgatggtcagcaaaagcaagagaaccagattaaagcggtgcgttcgtttatcgctcagggcgtggatgccatctttattgccccggttgtcgccacgggctgggagccggtgctgaaggaagccaaagatgctgaaattccggtcttcctgctcgaccgttccatcgacgtaaaagacaaatctctctatatgaccaccgtcaccgccgataacgtgctggaaggcaaactgattggtgactggctggtgaagcaggtggatggcaagccgtgtaacgtggttgagttgcagggcaccgtcggggcgagcgtggctatcgaccgtaagaaaggtttcgcggaggccatcgctaaagcatcaaacatcaaaatcatccgttctcagtccggcgacttcacccgcagcaagggtaaagaggtcatggaaagcttcatcaaggcagaaaataacggcaaaaatatctgcatggtttacgcccacaacgacgacatggtgatcggcgccatccaggccatcaaagaagcgggcctgaagccgggcaaagatatcctcaccggctcgatcgacggcgtaccggacatctacaaagcgatgattgacggcgaagcgaacgccagcgtggagctgacgccaaatatggcgggcccggcattcgatgcgctggagaaattcaagaaggacggcacccagcctgagaagttgaccatcaccaaatccacgctctacctgccggacacggcgaaagaagagttagagaagaagaaaaatatgggctactgatccagtgaaattgccgggtggcgctgcgcttacccggcctacgatacgctcttttgtaggccggataagcgtagcgtcatccggcctgatgcagggggaaaccatgaccaccgaacaacaccaggaaatcctccgcacagagggcctgagtaaatttttccctggcgttaaggcgctggataacgttgatttcagcctgcggcgtggggagatcatggcgttgctcggcgaaaacggggcggggaagtcgacgctgattaaaaccctgaccggggtctatcacgccgatcgcggcgctatctggctggaaggtaacgccatttcgcccaaaaacaccgcgcatgcccagcaactggggatcggcacggtctaccaggaagtgaacctgctgccaaacatgtcggtagcggataacctgtttattggccgcgaacccagacgttttggcctgctgcgccgcaaagagatggaagcgcgcgccgcgaagctgatggaatcgtatggcttctctctcgacgtgcgcgaaccactgaaccgtttttccgtagcgatgcagcaaatcgtcgcgatctgtcgcgctatcgatctctcggcgaaagtgctgatcctcgatgaacccaccgccagcctcgatacccaggaagtggagatgctttttaccctgatgcgccagctgcgtaatcagggcgtcagcctgattttcgtgacgcatttcctcgatcaggtttacgaggtgagcgaccgtataacggtgctgcgcaacggcagctttgtcggctgccgggaaacccgcgagctgccgcagatagagctggtcaaaatgatgctgggccgcgagctcgagaccaacgcgcttcagcgcgcgggccgtacgctgctgagcgaaaaaccgatcgccgcgtttcaccattacggcagaaaagggaccatcgcgccgtttaacctcgaggtacgccccggtgaaattgtgggtctggcggggctgttaggctccgggcgcaccgaaaccgccgaagtcatcttcgggatcaaacctgccgacagcggaacggcgctgatcaaaggcaaaccacaaacgctacgttcaccgcatcaggcgtcgtgcctcggcgtgggcttctgcccggaggacaggaaaacggacgggattattgccgccgcctcggtgcgggaaaacatcattctggcgctacaggcccagcgcggctggctgcgtccgatccctaagcgcgagcagaacgcgattgccgagcgcttcatccgccagctcggtatacgtaccccgagcgcggaacagcccatcgagttcctctcgggcggtaaccagcagaaggttctcctctcgcgctggctgctcaccaagccgcaattcctgatcctcgacgagcccacgcgcggtatcgacgtgggcgcgcacgccgaaatcatccggcttatcgaaacgctctgcgccgacggtctggcgctgctggtgatctcgtccgagctggaggagctggtcggctatgccgatcgcgtcatcatcatgcgcgatcgcaggcaggtggcagagatcccgctggataaactgtcggtaccggcgatcatgaatgccatcgcggcgtaaggagtcaaatgtgatgtcccgttctctttcgcaaactggcgaagcgaagcgccgcttcacctggccgaccggcacgccgcaaatcgtggcgctgctgctggtgctgctggtggatagcctggtggctccgcattttttccagatcgtcgtgcaggatggccgcctgtttggtagcccgatcgacatcttaaaccgtgccgcgcccgtggcgctgctggcgattggtatgacgctggtcattgccaccggcgggatcgacctctccgtcggtgcggtaatggcgattgcgggcgccaccgccgcctcgatgaccgtcgccgggcacagcctgccagtggttctgctggccgcgctgggctccggtgtattagccgggctatggaacggcattctggtcgcagtgctcaagatccagccgtttgtcgcgacgttgattttgatggtggccgggcgcggtgtggcgcagcttatcacctccggtcaaatcgtcacctttaactccccgagcctggcgtggatcggcagcggtaattttctgttcttcccgacgccggtgatcgtcgcgctggtgacgctggtggtgttctggcttttcacccgcaaaacggcgctcgggatgttcatcgaagcggtggggattaacattcgggccgcgaaaaacgccggggtaaatacgcggctgatggtgatgctgacttacgtgctgagcggcgtctgtgctgcgattgccggggtgatcgtggccgccgatattcgcggagcggatgccaataacgccggactctggctcgagctggatgcgatcctcgcggtggttatcggcggtggatcgctgatgggcggacgttttaatctgctgctctcggtggtgggggcgttgattattcagggtatgaataccggtattttgctctccgggttccagccggagctgaatcaggtcgtcaaagcggtcgtggtgcttatcgtacttatcgtgcagtcgccgcgctttatcactctcattaaggggaaccgcggtcatgataaaacgtaatttgccgttaatgatcacgctgggcgtgttcgtgctggggtacctctattgcctgacccagttcccgggcttcgcctccacgcgggtgatttgcaacatcctgaccgacaatgcctttttaggcattatcgccgtcggcatgacgtttgtgatcctctccggcgggatcgacctctccgttgggtcggtgatcgcctttaccggcgtgttccttgccaaggcgattggcttttgggggatttcgccgctgctggcttttccgctggtgctggtcatgggctgcgcgttcggcgcctttatggggcttttgatcgatgcgctgaaaatcccggcctttatcatcaccctcgccgggatgttcttcctgcgcggcgtgagctatctggtgtcggaggagtcaattccgataaaccatccgatctacgacacgctctccagtctggcgtggaaaatccccggcggggggcgcctgagcgcaatggggctgctgatgctgggcgtggtggtgatcgggatcttcctcgcccaccgtacccgatttggtaaccaggtttatgccattggcggcagcgccacgtccgcgaacctgatgggaatttccacgcgcagcacgactatccgcatctacatgctttcgaccgggctggccaccctcgcggggattgtcttctcggtttatacccaggcaggctatgccctggcgggggtgggcgttgagctggacgccattgcctcggtagtgattggcggtacgctgctcagcggcggggtggggacagtcctcggcacgctgtttggcgtggcgatccaggggctgattcagacctatatcaacttcgacggcacgctcagctcctggtggaccaaaatcgccatcggcattctgctgtttatttttatcgcgctccagcgcggcctgacggtgctgtgggagaaccgccagagctcgcctgttacccgggtgaatacatctttaacagagcgataacatgctgaaattgcttaaactctaaacattttccggtagcggccgatattctttttttatgcccagaaatatctcgctaccggaaataacatcatgcttaaaacgctatcgattcgtaccggcttgctctctttactggccgttatgacccttctgctgctgattgtcagcggcatcggcatttatgcccttacacaaagttccgcttctctccagcgcatcaatcatcttcagggtgaacagatggtgcagctgaatgccggctatacgctgatcctgcgcgcgcgtaacgaagcggggcaggccgttcgcatgatggaggtcggcctgctggacgatgcggccagggcggtcaaaaccattaaccaggaagtggcgctggcacagaaaacgctgaaggacgtgatcggcagcggcgtggcggatgagcaggggcaaaagctgctggataacgttgccgcgagtctggcggtgtacaaccagcagggtatcagcccgatgctgaaagccctgaacgagcaaagcgcggacagctattacgatctgctggaaaacaagctggtaccggtggcgaagcagtttgataacgatatgcaggcgttccaggcatggagcgaggcgcgcggtaaagcggaggtgagcgccgtgcaggcgagtaaaacccgcgtgctgatcctgattatcgtcgcggcgctgctgacggctggcattatcgtgctggcctggctggtgctgcgccatatgctgctcaagccgctttcagcctcgattgcccagctggaacatgtggcggccggggatttaacccataccctgaacgcgccggcgagccaggaatttaatcgccttaacgcggcgatcgaagggatgcgccagtcgctgatggactcggttctgcgggtgcgtgacgccagctcgcagattgataccggcagccgcgagctgacggccgggaatatgaacctggcccagcgcacggaatccaccgccacctcgctggagcagacggccgccagcatggaagagatcaccgccacggtgaaacttaacgccgataacgccgagcaggcgcaccagctggcgaagtcggtctccgataccgccgatcacggcagtgaaatggtctgctatgtcattgagaagatgcgcgacatctccggcagttcggcgcgcatcgccgatatcctgagcgtcatcgacggcattgccttccagaccaatattctggcgctgaacgcctccgttgaagcggcgcgtgcgggtgagcaggggcgaggttttgcggtcgtggcgggtgaggtgcgtaatctcgccagccgcagtgctgatgcggcgaaagagatccgctcgcttatcagcgattcgcaaacccacgtgaacgagggcagcgagctggcgcagcaggccggtgagacgatggacgagatcgccaccgaagtactgcgtatgaccaaactgatgcgtgaaattgcgacggcttcccaggagcagagccgcggtattgagcaggtgaatatcgccgtcaatcagatggatgaaacggcgcagcaaaatgcggcgctggtccagcaatcatctgcggcaactcgttccctggaggaacagtcgcgcgagctgatggaagcgatggcctccttcaagctgacgatgcaaacggcctgaaaaaaagggagcctgcctggctccccttttcgtgcgttacgcgtccgggaattcgcggatcatgcgttcaacgtcatccaccatatggcggttgccgacgaagaatgaacggcgctggtgcaggctttccggcacgatatccagaatacgctctttaccgtcgatcgccttgccgcctgcctgttcggccaggaatgccatcgggttgcactcgtacagcagacgcagttttccgtccgggtggctggcggtgcttgggtagaggtaaataccgcccttcagcaggttacggtggaaatccgccaccagcgagccgatgtagcgcgaggtgtatgggcgctgggtggctttatcctcttcctggcagaatttgatgtacttcttcacgccgttcgggaatttgatgtagttgccttcgttgatggagtaggtgttgcccttctccgggaagcgcatacgctcctggcacaggcagaacacgcccagggacggatcgtaggtaaaggcgtgtacgccgcagccggtggtgtacaccagcatggtggacgagccatacaccacataaccggcagcaacctgtttactgcccggttgcaggaagtcttcttccgtcaccggtgtgccaaccggcgtgacgcgacggtagatggagaaaatggtaccgacagaaacgttaacgtcgatgttggaggagccgtccagcggatccatcagaacaacgtatttcgcgtgttcacacccttcgaatacgacgatctcatcttcttcttcagaggcgatacccgcaacgatgtcgcgcgcgcgcagtgcagctttcagtttttcattggcgaacaggtcgagtttctgctgaacctcaccctgaacgttctcggcaccgcttgcacccagaatatcgaccagaccggccttgttgatatcgcggtggatgatcttagcgcccagctttattgccgacagcaaagcagtgagctcacccgtagcatgagagaactcgtgctgcttctcgacaataaattcacctaacgttttcataacactttccctgcatcttatgttgagtaaagcggttgatgtccaacaatcttaacaaacattcaaatattagcgcagaggtgaatcgcgccagcaaaatacggatttacctgaaatgcgtttcacagccgctgacatgtgagtaaaatgtgcgccacattgaagaaggatagtgacgtatgcgcattcatatattggggatttgtggcactttcatgggcggactggcaatgctggcgcgctcgctgggccatgaagtgacaggttcggacgccaatgtgtatccgccgatgagcacgctgctcgagaagcagggaatttctctgattcagggatatgacgccagccagctggagccgcagccggatctggtgatcgtgggtaacgccatgacccgtgggaatccatgcgttgaagcggtgctggaacgcaatatcccgtacatgtctggcccgcagtggctgcatgattttgtcctgcgcgaccgctgggttgtcgccgttgccgggacgcacggcaaaaccaccaccgccggtatggcgacctggatcctcgaagcctgcggctacaagccgggcttcgtgatcggcggcgtaccggggaatttcgacgtctccgcgcgtctgggcgacagcccgttctttgtgattgaagcggatgaatacgactgcgcgttcttcgacaagcgctccaagttcgtgcattactgcccacgcacgctgatcctcaacaaccttgagttcgatcacgcggatatctttgacgacctgaaagcgattcagaaacagttccaccatctggtgcgcattgttccgggtcagggccgcattatcctgccggagaacgacatcaacctgaagcagactatggcgatggggtgctggagcgagcaggagctggttggcgagcaggggcactggcaggcgaaaaagctcaacgcggatgcctccgaatgggaagtgctgctcgacggtgagaaagtgggcgaggtgaagtggggcctggtgggcgagcacaacatgcacaacggcctgatggcgatcgccgcggcgcgtcacgtgggcgtactgcctgcggatgccgccaatgcgctgggctcgtttatcaacgcccgtcgccgtctggagctgcgcggtgaagcccacggcgtgaccgtgtatgacgatttcgcgcaccacccaacggccattctggcgacgcttgccgcattgcgtggcaaagttggcggcaccgcgcgcattctggccgtgctggaaccgcgttcgaacaccatgaaaatgggtatttgcaaagacgatctcgcaccgtccttagggcgtgccgacgaggtcttcctgctgcaaccgcagcatattccgtggcaggtggccgaagtggcagacgcctgcattcagccggcgcactggagtgcggacgtggatgtcttagcggatatggtggtgaaagccgcacagcctggcgatcacattctggtgatgagcaacggtgggtttggtggtatccatcagaagctgctggacggtctggcgaagaaagccgcggccgcagagtaaaaaaaagcccggtggcgcttgcgcttaccgggcctacattttttcgcacgaccttgtaggccggataaggcgtttacgccgccatccggcgcaaacccgcacagattactcttcgttctcagacagctcgcgcagatactggaaaatcaggcgcgcagacttcggcggcttattcccttctttctctttcttcgcgttgcggataagcgatcgcagctgctggcggtcggcattcggccacaggttcagcacttcaggtactgcgtcatcaccctgctcgatcaaacgatcgcggatctgctccagcttatggaacagcgcaacctgctggttgtggcggtttttcagtttgtccagcgcctgacggatcggctccacgtcgcgctgacgcagcagtttaccgataagctgaagctggcggcgacgcccttctttcttgattttctgtgccagttcaatggcatcacgcagatcctggtcgagcgggatcttatccagcgcgtttttacccagttctaccatttctgcgccaagctgttttaactcttcggcgtcacgtttaatttcacttttactgacccagatgatctcatcatcttcgtcttcgatgtcatcaccgggaacgtcgtcgagccagtcttcgggctgcttagtcatgtcaggctccttaaaaaaagaggctaatgttaccagttaagacgcgcactgaaaaacggttctctgttagacttcacttaactctctcttacagtatggcatttgcgatgaaagtaacctcacaagttgaagcgcagcgtaagatcctggaagaagccgtctccaccgcgctgacgctcgcttcaggtaaatcagatggcgccgaagtggcggtcagcaaaaccaccggcattagcgtgagcacccgctatggcgaagtggagaatgtagaatttaacagcgatggcgcgctggggatcacggtgtatcaccagaatcgtaaaggcagcgcgtcgtctaccgatctgagcccggatgccatcgcccgtacggtgcaggcggcgctggatatcgcgcgttacacctccccggacccttacgctggcgtggccgataaagagctgctggcgtttgacgcgccggatctcgatctgttccatcctgcggaagtgacgccggatgaagccattgagctggccgcgcgagccgagcaggcctctttgcaggctgacaaacgcatcaccaataccgaaggcggcagctttaacagccactacggcattaaagtgtttggtaactcccatggcatgttgcaggggtactgctcaacccgccactcgctttccagctgcgtcatcgccgaagaaaacggcgatatggagcgtgattacgcgtataccattggccgcgcgctgggagatttgcagtctccggagtgggtgggaaaagcgtgcgccgaacgcacgctgtcacgcctttcgccgcgtaaactctccaccatgaaagcgccggtcatttttgccaacgaagtggcaaccggcctgtttggtcatctggtgggagcgattgcgggcggttcggtgtaccgtaaatcgaccttcctgctcgactcgctgggcaagcagatcctgccggaatggctgaccatcgaagagcacccacacctgctgaaagggctggcctctacgccgttcgacagcgaaggcgtgcgcacggaacgtcgtgatatcgtgaaagacggcattctgacccagtggctgctgaccaactactccgcgcgtaagctggggctgaaaagcaccgggcacgcgggcggcattcataactggcgcattgccggacagggcctgaattttgaacagatgctgaaagagatgggcaccggcctggtggtcaccgagctgatggggcagggcgtgagcggtatcaccggcgactactctcgcggtgcagcgggcttctgggtcgaaaacggtgaaattcagtatccggtgagcgaaatcaccatcgccggcaacctgaaggacatgtggcgcaatattgttacggtcggtaacgatattgaaacacgcagcaatattcagtgtggttctgtattactgccggagatgaaaatcgccgggcaataatccccgtaaaagcgtgattaataataaaaaaaggaagtgagcaatgcgtaaacacctgttagcgatcgtcgcggcttcaacgctggttcttggctcgtctgcgtttgctgccgatctcgaagacaacatggacatcctcagtgaaaacctgaaggtggtgcagaaaacggacaatgcggcggacatgaaagacgcattgactaaaatgcgtgaagccgcgctggatgcgcaaaaagcgacgccgccgaagctggaaagcaaagcggcagacagcgccgagatgaaagactaccgccacggttttgacgtgctggtcggccagattgacggcgcgctgaagctggcgaacgaaggcaaagtgaaagaagcccaggcggcagccgatcagtttgtcgcgacccgcaacacgtaccacaaaaagtatcgttaattgggtgcctgagctgtacgtcctctccccgtatgcggaggcgcatgatgcgcccccgcatcgttgctccctacttgccggagcgacaatccatccgcgctgtcacttcaagcgagccgttacgaaaacggatctcgcacagtgttttcctcgtcaccagcgttaagatgattattgtcaaagaaataatcatcaaaaccccgatacttgggtttctgcgtttcatggatgcctccttgcttttaagcgggcgaggtagcgaactccacggtgtgacgtgtcgtttcgagcccccgccctgattttttatcaggcggggctttccactttccgtcccatgcctgagacggtcagtctcaagcacccgccgccactctagcggatccccataagaaaaccttatccacgtcacatttctacgagcctgctcgtaatcttttccactccgcttaccagtctaatgccgcgtaatagcgtgatattcatcacgtaaatccagcgatttatacagattcaccgcatttatgtggcacagatcactgccgctgctcgcctttccacttcgaagtggaaaacaactcgctacaaacaattccccctcgacgttagttttattccagagccattaacggggtaagacgagtgattaacggagcggtaatgaacgacgttggggaacaggcggtgcaaacagaacagctcgcgaacaccatgcttcagcaggtctacgccctgctggcccggcacaacatcattcccaacgcggtacaggagcagatgctgacctcccacgttcgcgcaatggcgcaccggtccgtgaccggcgagccgctgccggaggttgaagcagagctgttcgacgaaatttcaccagattcaatgcaactcgcccgtgaagtggtagcgcagttcggcaaccttcctgatgaagaggcctggctgctctccgttcacttcgaagtcgcgaaagacaacctttaaggagcaacacatggaacagattacagtcgtgattggcgatcgcctgggtaaaggtcagaaagtggctgcgggtgtggaaaaagccggcggacgcgcggttgtcgtaccgggcatggcagcggatatgaagctcggtgacgtgatgaaagcagaaaacgccaccttcgggatctccttctgcggcagcggcggcgcgggcgccatcaccgctcagaccaaatatggctacaaggccaaatacggcatgcgctccgtggatgagggggtgaccgccataaacgaaggctgcaacgtgctgggctttggctttatggataaagaagagctgggcgagcgtctggtacaggcgtggcagaagaaatacggcgcgtaagcatgaaagaacagttcacaaccacggtgagagtgaaggggaagggcgacgccaaagcgcgcgcctttgccgacgccctcaaccacgttcaggctgcggtgatgaaagcctcaccgcatatcttactgcgtattgagccacaggatgtgcaggttgttcaggcgcaagaagcggtgcgaaaagaagcgtttctgttcttctttttgcgccgggaaagacgcacctacagcgtggagctggatgtgaccgtcaacgtgaccgccatcaatctcgaccaggtggatttcgtcacgcaacgctgattattcataaaagggcagactgatgttcttaattatattaataaaatcgctcatcattggcggcctggttggcgtcggtgttggcgccggggctgcacgcatgtttcatgcgcctaccactcagggtatgggcgcgtttcgtacgttgggggaactgaactcctgcgaaggggatccggcgtcccacttctcctttgggttaggtttcttctttaacgcctgggcctcttccgtggccgcaggtgccttcacacaggacgttgaccaccgcatcatcccgaactggggtgctgctgcactgatgattaaaaaccgtaacgtcggtgaaacgctgcatgacccgcgcaaaatggcgattgcctgcggcatcatcggcatgattgttgtgaccttccttaacctgaccgcctcctccgttccggcagcgcttcaggtgaccgccgtgaaggtgctggtaccggcggcgaacctgctggtcaacaccgtgatgccggtgatcttctggctggcggccatcgacgcgggtaaaaaatcgggcttctgggccaccatctttggcggcgcggcacagctgatcatgggtaacgccgtaccgggtctggtactgggtattctgattggtaaaggtgttgaagagagtggctggaaccacgtcaccaaagtgatgatggcggcgatcgtcctgctcttcgtgctgagcggcttcttccgcggtttcgacatgaagatgatcgaatccttccatctgaccgtgccgaactggctcgacatgatccacaactcgctcagcggtaaataacaggagcctctaaatggaacagaataaaggtttttggtatgccgactggtcgttcccgatcttcgttggcctgctctcctccggcgtcttcgccgggacgcacatgtactacctctacggcatcggcgcgtttaacgaagtggccttcgtggcgatgctgaaagcgggaatcgataccggcgtctacggcgcggtggcggcgttcggtgctagcttcctgttcgcccgtattatcgaaggctcgctggtgggtattctcgatatcggcggtgcgatccagaccggcgtgggcctcggcgttccggcgctgctgctgggcgcggggatcatgttcccggtgaccaacttcattgccgcgctgattaccggcctggtgattggcctggcgattggctacgtcatcatcctggcgcgtaagttcaccatcaatcagagcaactccacctacggcgcagacgtgatgatgggcgcgggtaacgcctccggccgcttcctcgggccgttgattatcctcagcgccatgaccgcctccattccaatcggcgtcggttccctggtaggcgcgctgctgttctacatctggcagaagccgattaccggtggcgccatcctcggcgcaatgattttgggctggctgttcccggtcgccctttaatacccgcgggcgcttcggtgcccgctttatcaggagatcctcatgtttgatttactcctgcgccgtgcgcgcctcgccgacgataccctgaccgatatcgccatccaggacgggaagattgccgcgacaggcgacattgacgctcccgcccgcaaaacggttgagctgaacggcgacgtgttcgtcagcgcgggctggattgactcccacgtccactgctacccgaactccccgatttaccacgacgagccggacagcgtgggcattgccaccggcgtcaccaccgtggtggacgcgggcagtaccggcgccgacgacgtggacgatttttacgccatcacccgcaaagcctccaccgaggtgtttgccctgctgaacatctcccgcgtggggctgatcgcccagaacgagctggccaacatggcgaatattgacgccgatgcggtgaagcaggcggtgacgcgccacccggattttatcgttggcctgaaggcgcgcatgagcagcagcgtggtcggtgaaaacggcatcaccccgctggagcgcgcgaaagcgattcagaaagagaacggcgacctgccgctgatggtgcacatcggcaacaacccgccgaacctcgatgagattgccgaactgctgagctccggcgacatcatcacccactgctacaacggcaagcctaaccgcattctgacgccctccggcgagctacgcgcctccattacgtctgcgctgaagcgcggcgtgcgcctggacgtcggccacggcacggcgagcttcagctttgaagtggcgaagcgcgccattgcgatgggcattctgccgcataccatcagctcggatatttactgccgcaaccgcatcaacggcccggtcggctcgctggcgagcgtgatgtcgaaattcctcgccatcggcatgtcattgccgcaggtgattgactgtgtcacggccaacgccgccgacggcctgcgcctgacgcgcaaaggccgcattcagcctggcctcgacgccgatctgacgctgtttacgctcaagcgccagccgacggtgctgacggatgccgaaaacgacagcctacaggctgaacacattctgatgccgcttgccgcgatccgcgcgggcaagggctacatgaccggacaagggagcacggaacatgccttcgatttatgagaagtacaacttaaagcaggttatcaacacctctggccgcatgacggcgctgggtgtctccacgccgcgcccggaagtggtgcaggcggcgatggacggcatgaatcactatttcgagatgaaggatctggtcaataaaaccggggaatacatcgcgaagctgctggaggtagaaggggcgacggtggtctcctgcgcgtcggcgggcattgcccagtccgtggcggcggtgctggtgaaagacagcgactggctgctggaaaacctgcacgtcacaccgattgaaaacaacgaaatcgtcctgccgaaaggccacaacgtgaactttggcgcgccggtgggcaccatggtggcgctgggcggcggcaagctggtggaggcgggctacgccaacgaatgctctgccgatcagctggcagcggcgatcactccgcgcacggcggcgatcctctacatcaaatcgcaccactgcgtgcagaaaagcatgctcagcgtcgagcaggcggcggtcgtggcgcgcaagcacgatctcccgctgatcgtcgatgcggcggcggaagaagatctgcacgcctactaccgctccggtgccgatctggtgatctacagcggcgcgaaggcgatcgaagggccaaccagcgggctggtgatcggcaaaacccagtacgttgagtgggtgaagcgccagacggcgggcattggtcgcgcgatgaaagtgggcaaagagggtatcctgggcctgacctgcgccatcgaacactacctgacggcgaccaaagagagcggggccgagatggtggcgaagatgacgccgtttatcgacgcgttgaacaccctgaacggcgtgaccgcgcgcgtggtctgggacagcgccggtcgcgatatcgcccgtaccgagattaagttcgacgaagccgctacgggcgtcggcacgggcgatctggtggcgaagctgaaacagggcgaatacgccatttacttccgtggctataaggccaacgaagggattatcgaggcggacgtgcgcagcgtgaatgctgaccagctgaacatcgtgtaccgccgcattagcgaagtattaggacaggagaaaaacgcatgaaactgacccccaacttttaccgtgaccgcgtctgcctgaacgtgctggcaggctcaaaggccaacgccagcgccatttacgaggcggcggaaggtcatgtgctggtgggcgtgctctccaaaaattacccggacgtggcgagcgcggttgcggatatgcgcgaatacgcagccctgattgataatgcgctctccgtggggctgggcgcgggcgacccgaaccagtcggcgatggtgagtgaaatctcccgccaggtgcagccgcagcacgttaaccaggtctttaccggcgtggccaccagccgcgcgctgctggggcagaatgagtcggtggtcaacggtctggtctccccgaccggcaccgtcggcatggtgaaaatctccaccggcccgctgagcagcgcagctatggacggcatagtgccggttgaaaccgctatcgccctgctgaaagatttcggcggcagctccatcaagtacttcccgatgggcggcctgaaatgccgtgacgaataccaggcggtggcggaagcctgcgcccgtcacgacttctggctggagccgaccgggggaatcgatctggagaacttcgaggcgatcttgcagatcgccctggatgcgggcgtgagcaaaatcatcccgcatatctacagctcgattatcgataaagccagcggtgatacgcgtccggaagatgtgcgtacgctgctggcgatgacgaagaagctggttaagtagaacctgaccctcaccctaaccctctcccaccgggagagggaacctttaccccctctccctttnnnnnnnnnnnnnnnnnnnnnnnnnnnnnnnnnnnnnnnnnnnnnnnnnnnnnnnnnnnnnnnnnnnnnnnnnnnnnnnnnnnnnnnnnnnnnnnnnnnnnnnnnnnnnnnnnnnnnnnnnnnnnnnnnnnnnnnnnnnnnnnnnnnnnnnnnnnnnnnnnnnnnnnnnnnnnnnnnnnnnnnnnnnnnnnnnnnnnnnnnnnnnnnnnnnnnnnnnnnnnnnnnnnnnnnnnnnnnnnnnnnnnnnnnnnnnnnnnctccctttgggagagggctggggtgaggggaaacaaaccgcacacacccgaaggagccaccatgcacacccgtaccctgcttgtcgcttcactctctttacttgctacctctgcaatcgctcaaacccagtacgcctgggtgggtacctataatccgaacggtgaagggctgtaccgctttaccgtcgatccgcaaaccggtgcgctgaacgataaaacactggtgagcaaactgccgaacgccgcgcagttaaccgtctcacacgacggcaaaacgctgtatctggcaagcgaagtggagcagggcgtggtgcaggcgctgcgcatcggtgataacggcgcgctgagcgagctgaatcaggtgtcctccggcggcgcggggccggtgtatctttccctgacgccgaacggcaaacatctgctggtggcaaactacatcagcggaactgtcgcggtgctacccgttaacgcagacggcagcctgggcgatgctacggacacccatcaggacaaaggcgaaccgggcgcggcgaagccggaagctgccgtcgaaggcagtttcgccatcagcgatcataacggcccacatgcgcacatgatcgccgccgatccgggcgggaaatacgttttttccaccgatctggggctggatcgcatctatcagtaccgttttgacgatcaaaccgggaagctgactccgaacgatccgccatttatcagcgcctcctcaaaaggggccgggccgcgccacttcgtctttacgccgaaaggcgatgccctgtggctgattaacgaagaggcgtctacgctcacccattatgcgctggacagtaatggcaggctgaaagagggtaaaacggtttcagccctgccggacggttataaaggcaccagttttgctgccgggctggcgctaagcgccgacgggaaacagctgtatgtcgctaaccgtttgcataacagcatcgggcactttaccgtaacggcggagggtacgctgacgcatcaggatgatgtctggacgcgcggcgactatccgcgcaccctgacgctcgataagcagggtcgctggctgtacgtcatgaaccagcgcagcgacaacattacccgtttccgcgtggcgccggacggcaagctgagcgccgagccagactataccccggtcggcagcccatcccagatggtcatttcaccctgagcagtaagaggacaacgacgtgcgatttccgaaccaacgtttagcgcaacttttcgatctgttgcaaaacgagacgctgccacaggatgagctggcgcagcggctgtcggtctccacgcgaaccgtccgggcggatatcaccgccctgaacgcgctgctggccagccacggcgcgcagttcattttgagccggggcaacggctatcagctcaaaattaatgatgtggcgcgctatcaacaattgcaggcgtcccacccgcgcgtgctgcgtattccgcgaaccggaccggagcgcgtgcactatctggtggtgcgttttctgacgtcagccttttccctcaagctggaggatctggccgatgagtggttcgtcagccgggccacgttgcagagcgacatggtggaagtgcgcgagtggtttcaccgttataacctgacgctggaaacccgcccgcgccacgggatgaagctgtttggcagcgagatggcgatccgcgcctgcctgaccgacctcctgtgggagctggcgcagcaggacagcctgaacccgctggtgaccgacgtggcgctgaacgcgggtgtagcggaaaagatggtgccggtgctgcacgatgcgctgacgcgccatcacattcgcctgaccgatgaaggcgagctgttcctgcgcctgtactgcgcggtgtcggtgcggcgcatcagcgagggctatccgctgccggaattccacgcggaagacgtggaagagaacgtgcgtgaggcggcgaaagatatcgcggtggctatccaggagctggcgggcaaagcgctttcgccgtcagaagagagctggctgtgcgtgcacattgcggcgcggcagatccaggagatcgcccccagtgccattaacgccgacgacgacgaagccctggtcaactacattctgcgctacatcaacacccactataactacaacctgctgagcgatgagcaactgcatgcagatctgctcacgcacatcaaaaccatgattacccgcgtgcggtatcaaatcatgatccccaatccgctgctggataacatcaagcagcactacccgatggcgtgggatatgaccctcgcggcggtgtcgagctggggcaaatacaccccgtatgtgatcagcgaaaacgaaattggttttctggtgctgcatatcggcgtcgggctggagcgccattacaatatcggctaccagcgccagccgcgggtgctgctggtgtgcgacgccggtaacgcgatggtgcgcatgatcgaggcggtacttcagcgtaaatatccgcagattgaggtgacgcgcacgctcacccttcgtgagtacgagcttgccgatgccattggcgaagacttcgtgatctccaccgcccgcgtgagcgaaaaatccaaaccggtggtgatgatcgccccgttcccgaccgattatcagttagagcagatcggcaagctggtgctggtggatcgcacccgcccgtggatgctggaaaaatacttcgacgcggcccatttccgcattctcgacaagcctgtcgaccagcaaacgctgttccgcgaactgtgcgggcagcttgaaggggaaggttttgtcggcgcggagtttctggattcggttatcgagcgtgaggctatcgtcagcaccatgctcggcgacggcatcgcgctgccgcactccctcggcctgctggcgcaaaaaacggtggtctacaccgtgctggcgccgcagggcattcagtggggggatgaaaccgcccatgtcatcttcctgctcgccatcagcaaaagcgagtacgaagaggctatggcgatttacgacatctttgtcaccttcctgcgtgaacgcgcgatggcgcgcctgtgccagtgcgagaattttgcggcgtttaaggctgaggcgatggagagtttgagtcggttttgacgttcaggcggacagaggatatccgccttcattcaacgcagatgatgcacaacctggttgctgctgccgcgccagataagcataggatcttttagatcctgcacgaacttgccgtcgaccaggacgttaatcagatccaccacttccatctgctgcgcattcagttcatccagcttatagcccgtccagacccagacgtcttttcccgcgcactcgcggcggatgcgttttaccagcttcaggatcgccggcacgttttgcggatggagcgggtcgccgccggagagcgagatcccctggcgtttgatgcgcgtgtcgttcaggtcgttgatgatgcggtcttccatctcagcggtaaacggcatacccgagttcaggcgccaggtgcttttgttgtagcagccggggcactcgtgaacgcagcctgatacaaacagggtacagcgggtgccggggccgttgacgatgtcgacggggtagtactggtgatagttcatcgcgaataaccacgccgggtggcgctgcgcttacccggcctacaaaagagagcggtccgtaggcccggtaagcgcagcgccaccgggcattaacgtggcagcggattacccgatctgcccattccccagatgtttcaccctgcgcttcacctcttcctgcttcccggcgttaaacggacgggcgtccgggctgccaaggtagccgcacacgcggcgggtcacggaaacgcgggctgcgtcgtggttaccgcatttcgggcaggtgaagcctttgctggtgcactcgaactcaccggtaaagccgcactcgtagcactcgtcaattggcgtgttggttccgtagtacggcacgtgctgatagctgtaatcccacacgtcttccagcgccttcaggttgtgctgaatgttggggtactcgccgtagcagataaaaccgccgttcgcgatgggcggataggccgcttcaaagtcgatcttgtcgtacgggttcaccttcttctccacgtcgaggtggaagctgttggtgtagtaacctttgtcggtcacgccttccacgatgccgaactcggcggtgtccagacggcagaagcgatcgcagaggttttcgctcggcgtgctgtacaggctgaaaccgtagccagtttcctctttccactggtctaccgcatcgcgcaggcgctgcacaatcgcgatacctttctcacgcagggcgtcgttgtcatagatgtgcttgtcgccaaacagcgcgttaatcgtttcgtgaatgccgatatagccaagagagatcgacgcgcgaccgtttttgaagatctccgacacatcatcgtccgccttcaggcgcacgccgcaggctccttccatatagagaattggcgcgacgcgggctttcaccccttcaagacgggcgatgcgggtcatcagcgccttacgtgccagctgtaaacgttcatccagcagcgtccagaaggccgcttcattccctttagcttccagcgcgatgcgcggcaggttcaggctgatgacgcccaggttgttgcgcccgtcgtggatctgctcgccgttctcatcttcgtacacgccgaggaagctgcggcagcccattggcgttttaaacgaaccggtgactttcaccacctggtcgtagttgaggatgtccgggtacatacgcttgctcgcgcactccagcgccagctgcttgatgtcatagttcggatcgccaaacttgtgattcaggccgtcgcgaatggcgaacaccagtttcgggaacaccgccgttttacggtttttaccgaggccggagatgcggttgcgcagaatagactgctggatcaggcgtgattcccagctggtgccgaggccaaacccgaaggtcacaaacggcgtctggccgttggcggtgtgcagcgtgtttacctcatattccagcgactggaacgcgtcgtagcactctttctcggtgcgggaacgggcgtaaccgtcggcatccgggatctgccactcttccgccgttttacggtgtttgttgaagctctcggccacgaacggggccagcacttcatcgatgcggttaatggtggtgccgccatagatgtggctcgccacctgggcgatgatctgcgccgtgaccgccgtcgcggtggagatggatttcggcggctcaatctcggcgttacccattttaaaaccgtgggtcagcatgcctttcaggtcgatcagcatgcagttaaacatcgggaagaacggcgagtagtcgagatcgtgatagtggatctcaccgcgctcgtgcgcagacaccacgtcgcgcggcagcaggtgctggcgggcatagtgcttggcgacgataccggccagcaggtcgcgctgggttgggatcactttgctgtctttgttggcattttcattaagcagcgacgagttggtttgctctaccaggccgcggatctcctggttcaggcgaccgcgtttctcacgctggacgtcacggtcgtgacgatactcaatgtaggcgcgcgccagctgcttgtacggaccagacatcagctggttttcaaccgcggtctggatctcgttgatatccacctggctgcgttcatgcatctggctgctaacgacttctgcgacggtggcgcagtaatctgcgtcatcgactcccgctgctttagctgcacgcagaatggcttctttgatgcgctctgatttaaacggcactttacagccatcacgtttcatcacatgcggtgtcatgatcactccattttaaaaacaggttatccacaaaggtggagaagtattcaccggacgtattcctcgccgcggcaaagacttcccgcgtgcccagctcgtgttatccacaattccggccagcgttcgcgccgtcttgttgttggaatagtagacgataaatacaagatgttgggtcggcgtgcattttaagtgctacatatagtgatttgcatcaaacaagtttgcgatttttttgatgcagaacaaagtaaaaagacgagagtacaaacggcgggcgctggggcaattgtaaagactcgaaggaagaatctgattaattattcaacaaaaacaagcgctcagcagagcctgtgctgagcgctgctcgattaactcaccccgcaggcccagctcaaccctgcctgcaaaaaggctacggtaacgatgcagcccagtaccaacgggatgagaagagagctttcgggggcatcgtcctgtttttgagaaccttcattactcagcgcagacatcgcctcttcccgcgtacgcgccgccagcaattgctcacgcacccgctcatccgtgagtctgctggtcagcgtcgtcagcaggtgcatatgcgtactgcctgcttccgctggcggaatggcgagcaggaaaaccatcctcacctcttcatcaccctccagccccggccagcatatcggatcgtcaaagagcgccagacaaaatgccgcctgttgcaccgcctcggttttaccgtgcgggacagcgagcgcttcacccagcgcggtagggccttcactttcacgttgtaaaacgctttcgataaatgcctctcgatcgttgatgaccttccgcctggcgagcggctcggtgagccaacggatcactgcttccggcgtacgttggggcgggttgataaacaccagatcgggatgcgtcaatgccagcaagttcatattaagcctcaatcaaaaaatcgcaggttgcgaaggggaggatcgccgttaccggttgcatcggctcttccagatagttgatctgccgtaacactgccagannnnnnnnnnnnnnnnnnnnnnnnnnnnnnnnnnnnnnnnnnnnnnnnnnnnnnnnnnnnnnnnnnnnnnnnnnnnnnnnnnnnnnnnnnnnnnnnnnnnnnnnnnnnnnnnnnnnnnnnnnnnnnnnnnnnnnnnnnnnnnnnnnnnnnnnnnnnnnnnnnnnnnnnnnnnnnnnnnnnnnnnnnnnnnnnnnnnnnnnnnnnnnnnnnnnnnnnnnnnnnnnnnnnnnnnnnnnnnnnnnnnnnnnnnnnnnnnnnnnnnnnnnnnnnnnnnnnnnnnnnnnnnnnnnnnnnnnnnnnnnnnnnnnnnnnnnnnnnnnnnnnnnnnnnnnnnnnnnnnnnnnnnnnnnnnnnnnnnnnnnnnnnnnnnnnnnnnnnnnnnnnnnnnnnnnnnnnnnnnnnnnnnnnnnnnnnnnnnnnnnnnnnnnnnnnnnnnnnnnnnnnnnnnnnnnnnnnnnnnnnnnnnnnnnnnnnnnnnnnnnnnnnnnnnnnnnnnnnnnnnnnnnnnnnnnnnnnnnnnnnnnnnnnnnnnnnnnnnnnnnnnnnnnnnnnnnnnnnnnnnnnnnnnnnnnnnnnnnnggacgggagccggttgtgtcccggcgttaaatacgcgtaagacggtgccatgcagcagctgcgcatggggcagagcggaaaggatgagcggctccggcacggtcagtagcgagaactctgccggaagcctgcgttcgggcagacgcaacgaaaagcgctcaagacggtgatcgagcgtgtgtagcgtttgccgttggtaggtgaagggctgtccagccgcctgattttccagctggcgcagcgtgaggtggtcggcgttgtcggccagcgcgacagtgaatgaaaagcgcaacggtttcagcaactgggcatcaggagtctcaaccaccgtattattgatgccggaggcccgacccggtcgccattcgagatcgctgcgtccgagcacgcccgtggatttaaacatcgtcagggcaatagctgcgggttcgctgccgataatctgaaattctttcatgccacggctagtcacaaccagcgctttacccggttccgtgacagcgataataccctcgctggtttcgatatccacgggcatctcgcgatagcgttcttgccagtgttcaccgtcatatcccgtttcgcgctggatgattgcgaagggctgtgaggtgatagcgtgacgggtgtgaacatcgctgccgatcagtaaacgtagccggtgatcgcagtggctgttttccagcgaagcctcgacatacagattcggatcgtcgtggcgtaattcgcagaccagacgaatggataacggcgttcggatcgtatcctgacggctggcgagatcctgcggaagacgcattgtggcctcgacggtcagcttttcgacaagcggcgttttaacgccgtcgacgagcgtaaaatgcgaacagcgcgtcggcgtgtcgcccgcaagcggcgaaaaatcgtagctgtcgcccgcgtcagcgcagtcttcgagagtaaagaaagaggggatgcgtctgccgctgcgtttgtcttccaaagtaagcgttccggcatccagcgacagtcgataatgcgcattctctatctcgctgccctttatcttttcagacgccaggaaaggcgcagggtcttcttcaacgttaacggtgagatagccgatcggcggcagaaccggtgtctttaccgcaacgtgccagcggtaataagggagaaggggcgtctcgcactcgccctcggcggtaagggagatcgccgttccgccgggcagaatgtcccttttcaggacgtcgaaagggatgggctgcccctgatgcgtcagggcgatattatccgcccggctatacagggtggctatcaccacgcgctgcgttggggtagccagcgagttaaaaatcagcaggtcgccatcctgaacgcaggcggcggccagggttttcaccaccagattccacaggctatggcacagctgttcggtttgttccagtcgatgcagaatgtcgcggttggtggcatcgctattacagccgccaatggaatcgtgggcatggtttcgcaacagctttttccagagggtgtcgactaccgcgaggttgaccggaatcccctggtgacgcgccattgcgattgtcggctccagctgtcgcaggatgaattgttcaacctcatcgtttttctttttgatgtcgtagcgcacggagccgatcgttttatggatgcgggtgtagcgcggcgatttcagctctccttccaggagctcaaactgttcacgctgcgcgcgaagggtttctacataacgctccagagagctgatgaagtaacggtcctgatccggggactgtgcgctggcgacctccaggattttcggcagcgccgggtcgatgctgacctgatcgccgccgcagggcaggagcaggtcgtttagaccggcccgtgaacgcaaaagtgtggtcatcgggtagatttttccccggagatgggaggcttccgaacgcatgtttttagccgcgccataaccgagcgccattgcacaggcgatgacggtcgcacctgagggtgcgcgccagaggaactggctgcttttggcgtgcctgtcgtgatcgataccgcgccagaagacgatattgtcgatattgcagccctgcaagatcgtgggcatttgcgcattgtggccaaaggtatccggaagatacccaacctgcatcgcatgccccagcgtccgggcagaaaaaatgccgtacttcaggttgcggataatcgattcgccatgcacgttgtaggtgtccgtctgggtataccatggccctacgaagatccttttttctctgaccagcttttccagcctggtgcgataatcaggattgatggcgagaaagtcctccactaccgccatctgtccgtcaaggtgatagcaggtgtaagcggagtcctgctccagcgtgttgatgacgtccgcaaaattatatgacgccagcaccatgctgtcctgacgggtgaaataccactcctgatcccagtgcgtatgggcaatgacgtggatctgattcatgacgttccccttatctggcgttctttgggctgacatagagtacgcccagggcgcaaatcagtgcgccaataaagacgctcgccaggtagcccgccacgttggttgccagcggccagccccagacggctggcagaggcagcgtctgcttcacgccaagggtaatggcgaccagcgcgccggcgacggcaccggtcatgaacaccgggatcagacgtgggtttttcaggatgaacgggatcgcgccttcggagatcccaatcacgcccagcaacaacgaggtgctaccgacggttttctcttcctggctaaagacatccggtaatccaaagcggccgttgaggaacgcagcaaagccgacgccaatggaggggatcacgatggagagttcgcgggcggttaaatcaaacgtctcgctcatgccattcaggccgagcgcgaccgagcctgccgccttgttgaccggaccgcccaggtcgaacgcggtgcccgcggcaatcatcgcggaatagaacccgcgcccggtgtcacctgccgaggtaaaaaagaccaccatcagctggttaagcgagccaaaaatcgggttaatcaaatattccatgaccatcaccagcgtaatgccggtgatcagcgggacgagcagcatggttttaatggtggtgagctgctggcggacgtgaatcgaatcattgagccagcgcaccagatagcccacaaaaaagccgataccaatggcgccgaaaaagccggatggcataaagccttcgatatcaaagaagcgcttatagacttcgtctgacatgatgccgccaataagaccggggatgagtgccggtttaccggcaatggaaaacgccagatacatcgcaaaaacgggatacatgaacttaatggtcataaagcccactttatccagcacgctgaacggcgaatnnnnnnnnnnnnnnnnnnnnnnnnnnnnnnnnnnnnnnnnnnnnnnnnnnnnnnnnnnnnnnnnnnnnnnnnnnnnnnnnnnnnnnnnnnnnnnnnnnnnnnnnnnnnnnnnnnnnnnnnnnnnnnnnnnnnnnnnnnnnnnnnnnnnnnnnnnnnnnnnnnnnnnnnnnnnnnnnnnnnnnnnnnnnnnnnnnnnnnnnnnnnnnnnnnnnnnnnnnnnnnnnnnnnnnnnnnnnnnnnnnnnnnnnnnnnnnnnnnnnnnnnnnnnnnnnnnnnnnnnnnnnnnnnnnnnnnnnnnnnnnnnnnnnnnnnnnnnnnnnnnnnnnnnnnnnnnnnnnnnnnnnnnnnnnnnnnnnnnnnnnnnnnnnnnnnngatgttaataaactgcccggttattttggccgtcgccatcatcagcccgcccatcaccaccaccggcagcatatagctgatggctgccataatatggccaataaaaatctggtaagccgaacgctgaagatcgtcttcttgtgcgacagtggtgacgtttttttcctttgccagcgcctgacgcagatagcgatcggtatgtttgatcagctcttgtgtgcgggtttgaaggtgaggaatgttttcaaaacgctcggcatcctgaatgggaacgtcggttgccagaataatggccgtggcggaggcgatatcctgttttgttaagcggtttttaacgccatcgctgccctgcgtttcgacctttacctcgatattgtgctcgttagcccatgcaataattttattcgccgccataaaggtgtgtgcgatacctgtcgggcaggccgttaccgcgacaactttttgtttcgtcattgtcataattccctggatgtgaaaacaggggaagtataaagagaacctaaaacagtttttaatgtttgctaatactaattacgtatcgtgatacgcgtaaatgcaatgtgtgaagcgccttccagagactatttctctgttgtgttaatatcatctcgggattaaacggggcgtaatagatgaattcattccagggaagtgaacgtttgatatttgaatacattcagcatcatgcgtgtaatatttctaatatatcggcaaaagagattgcccgtgatacctttaccacgacaacatccgttaatcgtgtatgtaaaaaaatgggctataaaagctataccgagcttcggtaccgttttttacgcgaccattttacacctgcacctgctacacccgacgtggggccgcagccggatgatattgtgacagacgtgtccaggttgcttacgcattccagccatatctatctttacgcacggggagcctcgctcaccagcctcaactacctgtcgcgctttttgtcgctggcgagcctgccgcaccttattttgaatgacatgcaccagttgacacgcgtatcgaaggggacgctggtgttgatcagtaaatccggggagacgcagtcgctgattgaaatggcgcgtaacgcgctgcgcaaagggttgaagattattgcgattacccgtcaggggtcgacactggcgtcgatctcaacgctatgctggccgttaccaatcgacattaacgcggtttcgctgtatcagcgggaagggcagcttgaactgttaagcgccgtggaccgtatcggctgtaggctgctacagcacgatacggtgtagtcaggccgtcagagctgcttcactattcccagacgtacggcataatcattttcatggttgccgtcattattgatgtacgttttatccagtgaaaccagttcgacgtatggcgtccagccatcgtcgagcttgtagttgaacgcgacggtatgctcccagtaggtgtcatccccggttccctgatcgacgttatcctgccagcggaagcgcgggttataggacataccgaatttgccgatgttatacgcgaaccaaatgtcgaactggtgtgactggcggcgagtataaccgctgccgtcgagttctttatcgctgtgcgcgtcattgacggtgttatagcggtaacgggcggagagattcagaccgttatcgaaggctttccagccctgaatgaaggggcggtaatgcgtattgctggcggtgaaaaccgtcaccatgccaggcgcaacggcgaaaccatttcccagatcaaaacgccagcgcgtttcgatttcctgtgccgcttccgttaaccccttgtcgtcgggattatatctgtcggtatcaccaaaaaacgtatcattatggttttgtgcggcttcaacggagaagtaaaaaccgttattcgcctgatgcatgaccttaatgcgtgaatcatttacgtctgagcgcgtattatgaccaaagcgaaggtcgacggacgtattcccgcaccatccctgtgtgctcaataataatgcgctaatacacgttgctttaataattatctttttcataatatcctgccgaggttatttaattggcaggctatttttattttgagtgcgccatattgtaaaagttatcgtcgtacatttagcgtatcgctaaacataaaaaaagagatacagcatgctgtatctcctgaggtttattcctgcacccaccagatagcttcaaacgggcgcaatagcaacgtatcgggtcggaagggaacctcttcatagttgctgagtgccacccgccatgctccctctacggggacgggctgccactgctggcgcgcgtggctcaggttcgccaccaccatcagcgtttgtccctgccactggcggcggtagcaccacagggaagggtggtcaggcaggagatcctcataatccccccacgtcagtaccgacaaggttttgcgcaggcgaatcagcgactgataggtgtaaaacaccgaattggggtcgtccagcgccgcgcgggcgttcacggtttcgtagttgtcgcagacgccaatccacggctcggcctcggtaaagcccgcattatgcgaggcgtcccactgcatcggcgtgcggccattatcgcgtgacttactcgccagaatcgccagtagttcatccgtatcgcgaccgttagcccgctgttcggcgaacatgttcaggctttccacgtcgcggtagtcggtgatacggctgaaatgcgggttggtcatacccagttcttcaccctggtagatatacggcgtgccctgcatcccgtgcagcaccatgccgagcattttcgccgccgccacgcggtgttccccttcgtcaccaaagcgcgacacgatgcgcggctggtcatggttacaccagaacagcgcgttccaggctttgttgtgcatcccctgctgccagtggcggaaaagggtttttagcgccacgaagtccggcttcgccttcgtccatttttcgccgccggggtagtctaccttgaggtggtggaagttaaaggtcatcgacagctcgcggccgtcaagagacgcgtactgttggcagttctccagcgaggtggaggacatctcgcccaccgtcatcagattacgcggcgtaaagacgtcgcggctcatctcctggagatattcgtggatgcgcggcccgtcagtgtagaagcggcgaccgtcgccgagggtatcgtccgggaaatcctgatcttttgaaatcaggttaatcacgtccagacgcaagccgtccacgccgcgatcggcccagaactcgcacacttttttcagctcggcgcgcaccgccgggttttcccagttgagatccgcctgctccggtgcgaacaggtgcagataatactgctcgctttcggcgtgccagcgccaggcgttgccgccaaatttggagcgccagttgttgggaagcgtatccggcgtaccgtcgcgccagatatagaactggcggtacggactcgctttatccagcgactcacggaaccaggcgtgctgcgtggacgtgtggttaaagaccatatccagcacgatgcggatgccgtattcatgcgcccgggcaaccagttcgtcaaagtcgtccagcgtgccgtaggtcgggtcgatggcagtgtagttcgccacgtcgtaaccgttatccacctgcggggagatataaaacggcgtcagccagatggcgtcaatgccgagggttttcaggtagtccaggcgctgcgtcacgccgcgcagatcgcccgtgccgctgccggtggtgtcctggaaactctttgggtaaatctgatagatgacgccgttctgccaccagtgaggaagggtattcatagtacgttcctgcaaatgcgaaggggcgcaactgcgccccgaaagagagaattaaacaatctgcaacgtgccctgacggaacttacgctggtaaaccacagtagtcagcgccattgggatgataatcgccaccgccatcgccagcgcaaatacctgccagaacgcgggctgaatggagaggatacccggcaggcctccgacgccaatcccgttcgccatcacgctgttcaggccgcacagcaagcccgccagaccggagccgatcatcgcgcagagcatcgggaagcggtatttcaggttgataccgtacatcgccggttcagtgacgccgaggtaagcggagatggcagccggaacggagatctctcgctcgttgtgcttacggctgacgatgatgatgccggttaccgccgaggcctgcgcaatgttagacagggcgatgatcggccagacaggcgtaccgccgaggctctggatcatctgcatatcaatcgccagcgtggtctggtgcacgccggtgatcaccagcggagcgtagaggaagccaaacagcgcggcaccgattggcgcgaagctgccggtcatcaggtgacggaccgcgaaggccacgccgtcgccaatcatgcggccaaacggaccgataaaggcgtgcgccaggaacaccgccaggatcagcgagcagaccgggaccaccaccagatagaggtaatccggcacgatgcgcttcaggcgcgtctcaatgaagcccagcgccaggcccgccagcaatgccgggatcacctgcgcctgatagcccactttggcgatggtaaacaggccaaagttccacacctctggcgtttgctgaccaagtaagtaagcgttcattaactgcggagagaccagcgtcacgccgagcacgataccgagaattggcgtgccgcccatcttgcgcaccgcggaccagcagatcccgaccggcagatagaagaagatcgcttcgccaatcaaccacaggaagtcatagatgctttgcagcgccgggtacatctgcgccagggttttgccgtcgctcattggcacatcgccgatgacgttacggaagcccagaattaagcccccgctgatcagcgctggcagcagcgggaagaagatctccgcaaaatgggaaatcagctgctcatgccatttcatattctggcgcgcggccttcttcgcctgctctttatcggcggaagagtgcccggtagtcgccagcagagcctgatagtaatcgcccacttcggtaccaatcaccacctgaaactgcccggcgttggtgaagcagcctttaaccatggaaagctcttcaatggccttcgggttggctttggccggatcgttcagcacgaagcgcaggcgggtaatgcaatggctgacggtggcgatgttatcgcgtccgccgaccaggacgatcagctgatcgatatctgtttgtttgactttactcatcatgaaacctcatgacagatggtgataggggttatgacctgtgcgcaagcctactccttcaacgtgacggcgaaaatgggaacgttcccgaaatcgggcgaagatcacaataatctattcaaaagaattatgagagatgggcaggaataacgatctgacggggctcggtgcgcccggtaatctgctcgatcagctgcgcggctgcctgtcgcccagactcggcataacccggatcaacgctgataatctccgggtgtaagaacttcatcagcggcgtgcttcccacgctcgctaattgcagctccccgatgcgctgctcctgcaaatatttgctcgcacctaatgccagagtatccgtggcgcacaccagggcggtggtttgtggcgtcagcacgctggcgacctgttcatatccctgtttcatacccagacctggcagcgcggccacggcggggagattgtgttttttacaaaacgccaggtacgcttcatggcgacgcttgccggtggtgatgtcggcatggggcacgccgagatagctgatatgccgatggccctgttcatacaggcgctgcatcaggatcacgatcgccccttcgtcatcgtaacagacagaggcaaacccgctggcgtcgcgcgccagcagcaccagtgacggctgccagggtttgagcacgtcctccttaaggccagtaaatccaaacagcaccacgccatcaatattacggcgctgaagcatgccgagatgctcctccaccatttgcgcggagaacttgctctccatcatgatcggatcgtagccctgctcgtagaacgcgggcagcatagtctgtacggcgaggttttcggagagggaatccagacgcgagacaataatggcgaccactttatcgctctgcccgcgcatggcgcgcgcggagcgggaaggggaaaaaccgtgctgattcatcaccgcctcgacgcgctcgcgtgtgcgctcgctgacaccgctttcgttgttcagcacgcgtgagacagtcgatttccccacgccgcttaaacgcgcgatatctttaatcgtaaggcggttctgcatgctgtattccctgtaacaacgataaaataatcaattgagcctaatgctatcctgcgaattcgctatgggcaaagtctggtttacgttcggtttatttgcagggcgttataataccgcccgattagtcacaaacggtatggataaatcactatactgcgtgccgatacccaactttttacttaccggaggccacatggatcccgatcccacacctctcctgaccaggagaaaaccttctttccggtaagccagccttttgctgtctcaccggcgtgaggcagcaacgttcatacgttcctgcttgataaattaagtgcctgacaggtacggctttgccacgcctgcgggaaaactgcgtccgcctttgcggatgcgggggaatgactatgctgaagaatatcacccggcagctgcaagcgctgctgagccgtcacctgccacatcgcctgattgcgcgcgatccgctgccaaatgccaacaccatggcgggagcggcaatccccgcttccctgaccgagcgctgcctgaacgtggcggcgatggatgaaaacgaagtctggcgcgcctttggcggccacccggaagggctgaacgcgcaagaagtgttaaaaatccgcgcggaacatggcgataaccagatcccggcgcagaaaccctctccctggtgggtccacctgtggctctgctaccgcaatccgttcaacctgctgttgacggtgctcgggattatctcttacgccactgaagatctgtttgccgcaggcgtgattgccctgatggtggggatctccacgctgctgaactttattcaggaagcgcgctccaccaaagcggcggacgccctgaaagcgatggtcagcaacaccgccaccgtgtcgcgcgtgattaacgacctcggcgagaacgcctggattgagcttcccattgaccagctggtgccgggcgatctggtgaagctggcggcgggggacatgatcccggcggatttacgcgtcatccaggcgcgggatctgttcgtcgcgcaggcgtcactcaccggtgagtccctgcccgtagagaaggtagcgcggacccgcgatccgcagcagatgaacccgctggagtgcgacaccctgtgctttatgggcaccacggtggtcagcggcaccgcgcaggcgattgtcaccgccaccggcggcaatacctggtttggacagcttgccggacgcgtcagcgagcaggagagcgagccgaatgcgttccagaaaggcattggccgcgtcagcatgctgctgatccgctttatgatggtcatgacgccgattgtcctgctgatcaacggctacaccaaaggcgactggtgggaagcggcgctgttcgcgctctccgtggccgttggcttaacgccggaaatgctgccgatgattgtcacgtccacgctggcgcgcggggcggtcaaactctctaaacaaaaggtgatcgttaaacacctcgacgccatccagaactttggcgcgatggacatcctttgcaccgataaaaccggcaccctgacgcaggacaaaatcgtgctggagaaccacaccgacatcgccggaaaaaccagcgagcgcgtgctccacagcgcctggctgaacagccactatcagaccgggctgaaaaacctgctcgacgtggcggtgctggaaggggtggacgaggagtctgcccgcacgctctccggtcgctggcagaaggtggatgaaatcccgttcgacttcgagcgccgccgcatgtcggtggtggtcagcgagcaggcggacgtacatcagctgatctgcaaaggggcattgcaggagatcctgaatgtttccacgcaggtgcgccataacggcgagatcgtgccgttggatgagaccatgctgcgccgcatcaaacgcgtcaccgataacctgaaccgtcaggggctgcgcgtggtggcagtagccagcaagttcctgcctgcgcgggaaggtgactaccagcgtatcgatgaatccgatttgatcctcgaaggttacatcgcattcctcgatccgccgaaagagaccaccgcgccggcgctaaaagcgctgaaagcgagcggtatcaccgtcaaaatcctcaccggcgacagcgagctggtggcggccaaagtgtgccacgaagtcggcctggacgcgggcgacgtcgtcgtggggagcgacattgagcacctgtccgacgatgagctggccgagcttgcccaacacaccacgctgtttgcccgcctgacgccgatgcataaagagcgcatcgtcactctgctgcgtcgcgaagggcacgtagtgggctttatgggcgacggcatcaacgatgcgccagccctgcgtgcggcggatatcggtatctccgtggacggcgcggtggatattgcccgcgaagcggcggatatcattctgctggaaaagagcctgatggtgctggaggagggcgtcatcgaagggcgtcgcaccttcgccaatatgctcaaatacatcaaaatgaccgccagctccaacttcggcaacgtcttcagcgtgctggtggcgagcgcgtttctgccgttcctgccgatgctgccgctgcatctgctgatccagaacctgatgtacgatgtctctcaggtagcgatcccgtttgataacgtggacgacgagcagatccagaagccgcagcgctggaaccccgccgatctggggcgctttatgctgttctttgggccgatcagctctatcttcgacattctgaccttctgcctgatgtggtttgtgttccatgcgaatacgccagaacaccagacgctgttccagtccggctggttcgtggtgggactgctgtctcagacgctgattgtgcacatgatccgcacccgtcgtattccgttcatccagagccgtgccgcgtggccgctgattgtgatgacgggcattgtgatggcgctcgggatcgcgctgccgttctcgccgctggcaagctacctgcaacttcaggcgctgccgctgagctacttcccgtggttggtggcgatcctcgcgggctacatggtgctgacgcagatggtgaaagggttctatgcgcgccggtatggatggcagtaacggcaagcccggtggcgctgcgcttaccgggcctacgatccgaacgtaggccgggtaaggcgaagccgccacccggcagctggctttcctcccaaattcaacaacctgtgatctccgtcggcgcattcgcttgacgacaatttgagcgcatgttaacagaatgttttgcctgtatttggcccgtcagataaggaacattcatgttacggtacagcctcttaaccgccgggctcatgctcggcgcctccgcctttgccgccccggcaggtgaccttcccttaatgccctggcctgcgaaggttgaacgcccgaccactcagggcgcgctggtgctaaacaatcaactctccgtgagcgtcagcggcgaggatctgggggatgcggtcaaccgcctgcgccagcgtattgcgctgcaaaccggctggacgctacagccgcaggccgaaaaaccggacaagccgactatccgcatcgccatcgccaaaaaggtgaagccgcagccgctgccggacagcgatgagagctataaactcacggtggacgccaacggcgtaaatatctccgccaacacccgcttcggcgcgctgcgctccatggaaaccttgcttcagctgatgcagaacggcgccgaaaacacctcgatcccgtgggtaaccattgaagattcgccgcgcttcccgtggcgcgggctgctgctcgattcggcgcgccacttcctcccgattccggatattaaacgccagatcgacggcatggccgcggcaaaactcaacgttctgcactggcacttaaccgacgatcagggctggcgcttcagctcaaagcgttatccaaaattaacccagcttgccagcgatgggctgttctacaccccggagcagatgcgcgagattgtgcgttacgctgtcgagcgcggcatacgcgtggtgccggaaattgatatgccgggccacgcctcggcgattgccgtcgcctacccggagctgatgagcgcgccggggccgtacgccatagagcgccactggggcgtgctgaagccggtgctggatccaaccaaagaggcaacttatacctttgccgacgcgatggtcagcgaactggcggcgatcttcccggatccgtatctgcatattggcggcgatgaggttgacgacagccagtggaaagcgaacgctgcgctccagacgtttatgcgcgacaacaaactggcggacagccacgcgttgcaggcgtatttcaaccgcaagctggagacgatccttgagaagcaccaccggcagatggttggctgggatgagatctaccatcccgatctgccgaaaagcattctgatccagtcctggcagggacaggacgcgctggggcaggtggcgcagaacggttataagggcattctctcaaccggtttctacctcgatcagccgcaatccaccgcctaccactaccgcaatgaaattgtgccgcaggggctgaacggcgtggatgtgatagcggacaccgacagcgtccagagctgggctttctccatgccgcgtctgaaaggcaagccggtggaaggcagctttacgctggtgaaaggcgatgccgggtggcgtggatttattgattttgccgggaaatcgcgtcgggcggtggataacattcagtggcgggacgacaaccaggtaacgtttaccgttgatacctggatgggtgaaacgcgtccggtcgtttctgttgagaacgataagctcagcggctatttcctggtgggtaacgcccgctacccgatcgacggcacgcgtctggacgcggtgccaaaaggcataccgccggtggtgccggacccggcgaacgaggccaatctgctcggcggcgaagccgcgctgtgggcggaaaacgtggtcgcgccggtgctggatatccgtctgtggccgcgcgcctttgcggtggcggagcggctatggtcggcgaaggacgtcaacgacatcgacaacatgtatacccggctccaggcgatggacagctggtcgacggtgtcggctggactacagcagcatacccagcagcaggtgcagttcacgcgcctcgccaacaatgcggataccctgccgctgcaaattctcgcccaggcgcttgaaccggcgcagtattacacccgccagcatcttaagttccaggccggaaactatcatcagtttgagccgctcaaccggctcgctgacgcgctaaacgcggaaagtgcgatcgtgcgtcagatgaataaatgggcggaccgtctggtgagcgacgcggaagacacggaaagcgccgacgcgctgcgccacgtctttaaccgctggcagaacaacaccagcgatgcgctggccttgagcgaaaacagctatcagctgaaggcgatcaagccggtgattcaggaggtggacaagctttcgtcgattggcctgaggctgacggatctggtggcgcgccagggcacgctggacgacaacgagatcgcgtcgatccagagcgaactggataatgcggcgaagatccaggacgaggtggtgattgcggcggtttacccgctggaaacgctgctgcgtgcgacgcggaatcagtaacaaatgcgcccggtggcgctacgcttaccgggcctacgtgacgtgtaggcccggcaaacgaagtgccgccgggcgtgaaggcaactcagttcttcagcacccacgcctctctccagtgcgcgcccacgcctggctcaaactggtttgcggttgggctgtactgcacgcagtagccgctatacgggaacggtttacactcgtaggtcttaccgtttttaggctgtaacaccacggtgcccgctttgtaggaggcaatgctgtccgggaagataaagtcatgcgggccgctgctgtccgccgcgtcgctttccagcatcaggtttagcacgtcctgcgcgaacagggtgccgtctttgttggtggcgtagtatttcagcatatggtggcccgccgtgacgtcagtcagcgtcatggtcacgttttgattgacgttattcatatcctgcttcaggtaacctttttcggcaccgtggtggttcatcacgtgcgcttcaaaattaacgtcaccctgcgtgttcacatggaaggttacaatcacattgccatgttcgattttgctgtattgcagatcggaaacggcgatggtctcgctcacctgcgctttttgctcttcataagagatggcaacggatttcagcgtgctgccgtctttcacgaatacgctgttggcgccgtgaaccggactaatttcaccggcttcatctttcacaccgacgcggacatcgctatgagtggtgttgatcttctgcgccagatcgtaggaccactggttagcgtcgccttgttctgaagagccgatggtcatttcagtacgcagggcggcaacttccccgttggcgtcgaagaagcgtgcaatcactttatcgcccacgttcaggttattcccggcaatctgtccgctcagggttttactccactgggatattaccgctggggtatcgtccggcgtgacgttgccgccgttaccgaaatcaacgtcaatggcctgatagaaactgtttgcggtatccgcaatttcccacacgccataaataacctggtagcccgtacgttccgggacattacaggtcatggattttgtcatggacggtgcctgaccattcccgttaatagtacagaacggcgttaattcgaactggtcacgggtcagcggtttattggggtcccagttttgtttggtaatgtaataacgccagtgggtggttttatgcggcgcggtatggtgccagacaaattcatgcgggcctgccgtcatggggcttttagtccaggcgttcaggctctgcttatcaagctgggagtagctggcaataccgacgctggcaagctggccgtcaggcggcattgcgcccgtcgggaagccggaggtcttttctacgctctgcggttcatattgtacagagccacagtcaatattctggccgagcttacacatataagcgcggctggcgggggattctatatatccgtgtgcaagtgcggaagacgcaaccgctaatgtggcaatggccagcgcgatcttagagagtttcattcttcatccattaattagaatataacaaggcagcgtcagtctattaatggagtgggggatgcgtcattgcctggagaaagtaaaaatggtcgcaataaaaaaggcagcctgagctgccttctctttattgaaataaattagcgacgtacggcaatcgcttcaatttcaatttttacgtcttttggcagacgcgccacttccacacaggagcgcgccgggaaggtggcgttgtgttcggtgaagaacgcttcataagtggcgttaacggtggcgaaatcgttcagatctttcacgaacacggtggttttgacgatatcgcccactttcaggccggcagattcgacgatcgcctgcacgttttccagcgactgacgcgcctgcgccgctacgtcggctggcacttcaccggtttttgggttcaccgggatctgaccagaagtgatgatcatgctgcccagatcaacgccctgaacgtatgggccgatagccgctggtgcattttccgtcgcgagtactttgctcattttttctccagaattacagcgttaagaatgttcccggccattataacagccgggatttcattaccaacctcaattagttggccagcaccacataatgagaaaactctttttcgcagtatttgcatttgagtgcgatgtcattggcgcgctttttcactgcgaaactggaggaaaccggctcagcatgactgatgcagttgctgttcgggcagaccagcacgctttcgatgcgatccggcaggcttgggcgggatttgcccaccacgtcgtaatcgtcgatgcggttaaccgtggcgtccggcgcgtacagagacagctggttgacctgctcgtcggtcaggaaagtgttctcgatcttgatcaggtctttacggcccatttcgcccgacggcaggttcaggccgatggtgatgcgctggtcggtttcagtcagtttgaacagcgtcagcagcttaaagcccacctgcgcagggatgtggtcaatcacggtgccacgcttgatggcttcaacctggagtttgttatcgtgtgtcatggtcgtctccccttacagagctaattcgcgattcagaaccagtgccagtaacgcctggcgggcgaagatgccgtttccggcctgctggaagtaccaggcgtgcggcgttttatccacgtctgtggtgatctcatcgatgcgcggcagcgggtgcagcaccttcatgttgtcgcgcgcgccctcgaggtcgctggcgcgcagcacgaactgcgccttcacgttggcgtactcggatgggtcaagacgctctttctgcacgcgggtcatgtagagaatatccacgttgcccatcacctcttcgatgctggcgtgcaggctccacgcgatgcctttttcgtccagcatatcgagaatgtactgcggcatcgccagcgcgtccggcgcgatgaagaagaagcggttgccgttaaatttcgccagcgcctgggtcagggagtggacggtgcggccatatttcaggtcgccgaccatggcgatgttcaggttctcaagcgtgccctgcgtctcctgaatggtgaacagatccagcagggtctgcgtcgggtgctggttggcaccgtcaccggcgttcagcaccggaataccgccggaaaactcggtcgccagacgcgccgcgccctcctgcgggtggcgcatcacaatcgcgtccacgtaggtgctgatgactgaaatggtatccgccagggtctcgccttttttgcccagcgacgtgttgctgctgtccgagaagcccaccacgctcgccccgaggcggtgcatggaggtttcaaaggagaggcgggtgcgggtggaggcttcgaagaagcagctcgcaatcaccttgtgcttcagcagctccggttgcggattggccttcagttttgccgcggtttccagaaccagttccagctcttcgcggctgaggtcgtttatggaaatgatgtgtttttgataaagcggattcatgtttatctcctgacgccgggcaaaaaaaagcccctcaaatgaggggctctgggaataggtttagcaacgggaagaaaaacggcaggccagcgtctgatttcagacgcggtaagacgatatgtcgtacacgcttgaccatgcttcctcccggcaaattgtcgggcattatacgcagctcgcttttgggatcaagcgatttaatgcacgctttactcaatgcaaacggttctttatgaatattaatgcgttctgagtaaataattaatttgcttatgcaccagcgcggtgcgcttcaccacgcggggcgcgacccagacaatactgcttccggccaccacgcctaaaatttccggtaactggtgataatccagaatacgcgccaccgcgcggccatatccggcgacggtatggataaggataaattcgctgttgtgctccacgctcaccaccatttcagagacggtacgcgccgcgtcgggggccgggcgcagctggggattcagcgaataaatctttagccctttggcattgcgaatttttatgacaccgagcaacttgagcagacgtgaaacggtggactggctgatggtctcaaaaccccgctcctgtaagtcgcggcggatctcctcctgggagagatagctcttttccgcgatcagacgctggcagaccgttagctgtagttgctctttgggagagtactcttcgtaatccatcatagttcccatatcagttcccgaaataaccggtggcaccgcaccgatccgtaggccggataagcgcagcgccatccggcaaattacaacagggcgcccaggcttaacgccaccataatcaccaccgttaaaatccccagcagcggcgcgacccatttcagatagcgcacgtagggcacgcgggcgatagccagcccgcccatcacgacggcagaggtgggagtgatcaggttaacgatgccggacgccgactggtaagccgtaaccaccaggtcgcggttgacgttagcgaaatcggcaaggggcgccatgatcggcatcgtcagaacggccaggccggacgaagaaggcacaagaaacgacagcaccacttccagccagtacatcacgttgatgaacgccaccgtcgacaatccggtgaccattccctcggcgctgtgcaaaatggtgtgggtaatcatgcccttatccatgatcactacgataccgcgcgcgatgccgataatcagcgcgacgcccagcaaatctcgcgcgccgttgataaaggttgaggtcagctcctcttcgctcatgcgggcgatcagcccgacgataatcgcgctggcgaggaacaccgccgagatctccgccatccaccagcccagcaccgccacgccgtagatcatcaccgcgaaggcgagggcgaagatcaccaggatgagtttgcgcaccggggtaaactccagcgactgctcgcccttgttgccgaggaagtgggcgcggttctcttcctgcttatccgccacgatcgacagcgacggatccttgcgcaccttgcgggcgtaacgcattacccacgccacgcagatgatccagccgatcaccagcagcgcgatgcgcaacatgatgccgttggtgaaggggatcccggcggcgttggcggcgatcaccgtggcgaacgggttgatggtggagccgagggtgccgatccccgcgccgagcagcacggtggacgcagcaaccaccggatcgaaccgcgccgccagcatcaccggcaccagtaaggtatagaagggcagcgactcttctgccatgccgtaaatcgtgccgcctgcggcaaacagcgccatcaggatcgggatcatccactcctcgcggccgcgtagtcgggtggtgacgcgctcgatcccggcgtctatcgccccggttttagtgacgatcccgaggaatcccccgatgatcagaataaacagcgccacgtcgatggccccggcctggccggattctggatcgtacaggccggcaatcggcgccatcagcaccgaaaccagcccctgcgggtgcgctgccacgtgcgcgtaggtgccagcaaccggcacttctttaccgagcgcctcgttcattgccatatggtactgcccggccggaacaatccacgtcagcacggcaaccacggcaatcagaaaaaagagaatggtgtaagcggagggaaacttgaacttgcccatgatgttctcctgaacccggcgcaccccgcggcgcgccgggcggtgattagtcgccgagtgtcgccaccatgaccgctttaatggtgtgcatgcggttctctgcttcgtcgaaaacgatggagttcggtgattcaaagacctcttccgtcacctccagccccttcaggccgtacgccatctcgatttcgcggcccactttagtgtgctcgttgtggaacgcaggcaggcagtgcatgaacttgacgttcgggttaccggtggccttcatcacgtccgcgttgatctgatacggcttcatcaggctaacgcgctcggcccaggcctccttcggctcgcccatggagacccacacgtcggtgtagaggaaatcggtgccctgcacgccttcctccacgtcgtcggtgagggtgatgcgcgcgcccgtctctttggcgatggcgcggcactgctcaaccaggcccgcctccggccagaaggatttcggcgccacaaggcggatatccatccccattttggccgcgccgaccatcagcgaattgcccatgttgttccgcgcgtcgccgagataagcaaagctcagctccggcagggttttgcccggagagtgctccagcatggtcatcagatccgccagaatttgggtggggtggaactcgtcggtcaggccgttccacaccggcacacccgcgtactcgcccagctcttcaacgatggccnnnnnnnnnnnnnnnnnnnnnnnnnnnnnnnnnnnnnnnnnnnnnnnnnnnnnnnnnnnnnnnnnnnnnnnnnnnnnnnnnnnnnnnnnnnnnnnnnnnnnnnnnnnnnnnnnnnnnnnnnnnnnnnnnnnnnnnnnnnnnnnnnnnnnnnnnnnnnnnnnnnnnnnnnnnnnnnnnnnnnnnnnnnnnnnnnnnnnnnnnnnnnnnnnnnnnnnnnnnnnnnnnnnnnnnnnnnnnnnnnnnnnnnnnnnnnnnnnnnnnnnnnnnnnnnnnnnnnnnnnnnnnnnnnnnnnnnnnnnnnnnnnnnnnnnnnnnnnnnnnnnnnnnnnnnnnnnnnnnnnnnnnnnnnnnnnnnnnnnnnnnnnnnnnnnnnnnnnnnnnnnnnnnnnnnnnnnnnnnnnnnnnnnnnnnnnnnnnnnnnnnnnnnnnnnnnnnnnnnnnnnnnnnnnnnnnnnnnnnnnnnnnnnnnnnnnnnnnnnnnnnnnnnnnnnnnnnntttgggagagggttagggtgaggggaaaacgactcagttacgaatcaacgtgcctttctcgcccgccaggatctccgcgccgtcgaccagcgcgccgatcccggcaatgccgttgcaggcctcaacaaactcgcggcaggcggccactttcggccccatcgatccggcgtcgaactgcatatctctgagcagctccggcgtcacctgcgccagcggacgctgggttggcttgccccagtcgaggtacaccgcgtcggcatcggtgaggatcagcagggcatcggcttcgatctgacgcgccagcagggcggcggagaggtctttgtcgattaccgcctcaatgccgcgatagccgttggcgtgttccaccaccggcacgccgccgccgccgttgcagatcaccaggtggtcgcgctggatcagcgccgtgatggcgtcgctctcgacgatgcgcttcggctgcggcgacggcaccacgcggcggaagtagctgccgtcggccttaaacacccagcctttctctgcggccagcgctttagcctgggcttcgctgtagaccgggccgatgtacttggtcgggttgctgaacgccgggtcggcggcgtccacttccacctgcgtgagcaggacgctgacctcgcgctggggcagattgtttttcagcgcctgctggagcatgtagccgatcattccctggctttcggcgccaagaacgtccagcgggtagggagtgactttgtcgtaggcgctgttttgcagcgccagcagtccgacctgcgggccgttgccgtgcaccagcaccacgcgccactgctccgttaagccggcgatggtgcgggcggcctgctcgatgttctggcgctggatgtccgcttcaagcggctcgccgcgcttgagcagcgcgttgccgccaagggccacaaccagagtgggttttcgttccatgatggctcctttaaattccgtcgcgttccagtgggcagctcatgcagcgcgcgccgccgcgaccgcgtcccagctcgtcgcccgggatcggcagcacggtgatgcccgctttgtcgtacttctcgttggtccagacgttgcgctcgtagccgatcaccacgcccgggcggatggtcaggacgttgttagcgtcgttccactgctcgcgttcggcttcaaaggcgtcgccgccggtggtgatcaggcggacgtggttaatgccgagggctttctcgatggcgtgcagcaggtcggtttcctgggtgcgcagcaggccgccgcgtccgtccggggtgagcgtccagcattgggcgtccttgcgcaccacttccgggtaaacggagaaggtgtctacgtcgatgtgggtcatcacggtgtcgaggtgcatgcaggagcggtgtttcggcagctcaacggcaatcacgcgctcggcctggcgatgtttaaacagactgttggcgaggaactccacgccctgcggcgtcgtgcgctcggacatgccgatcagtaccgccccgcgaccaatcactaatacgtcgccgccttctaaggtggcgtggtcgtaattaatattctcgtcgccgaaatacttaataaactcgccgtcggcaaatgcggggtgccagcgatatattgcccgcaggttattggtttcacgctggcgggcgggtttcgccatcggattaatggagacgccgttataaatccagcaggaggtatcgcgggtaaataagtggttcggcagcggcttcataataaaatcattcgccgtgtgggtatcgaccaccatatttttaatggctgccggaatttcaccgtaggttaatccgccgcttaatctgcgcgccagttcccggtgcggcatatccgccagccagccgcgcacgtcggcggcaaaggttggtcccaggcgatagtcggagatttgtgtttcaagaagccaggcttttgcttcagcaatatcaagcgtttgcgtaagaaggtcggtcaacagcaggacttccacaccctgctcgcgcagcgtgtttgcgaagatgtcatgctcttcacccgcccgttcaaccgagagcacgtcatcaaatagcagctcctgacagtttgagggggttaaccgtttcagacttaaattaggacggtgcagcataacgctacgcaattgaccaatttcagaaccgacgtaatgcttttccataattattcctttaactttttttcagaataaaaagggcatgcgccatgtgatgtgtttaatttcatggcggctaagctcaattgatttcgtgatttatagtaggcgcttaaataatggttattgtgacattgctcacgcgaaaaccgatattgaacagtttattttcaattgcatgattcgtatcagataatgattaatttcatattattaagggatgaatagctaagcaggaacgggtggcaatatttgaagttgttattattttgtagaatcacacgctttgaaatatttggttatgttgttgattttaatggataaaatgttgtcacgggaatagctatgcaataatgacagttaactatttttcacttaagagaaatcaataaataattatggatttttaaaggaaataaccaaagtggtaaagtgtgatacaccaacaggttttgtgagttatgttttaaattcagtgagttagatcctatgtgcaaagtgcatgaaatgaggttatgcataaccactgcataaatgcctgtgtgcaattaacagtggattaacacatttcccgataaacatgcgctgacgcaaatcttgtcaaaaaagggctggtatggaagaggcaattctcgtataaaacataaaaatgaaacaatgttttaatctgagggttgtatcatgattattggcaatattcatcatctccagtcctggttgccagaagagctgcgccaggccattgagcacgttaaggcccacgtcaccgacgcaacgccgaccggtaagcacgacatcaatggcaacagcctgttttatctggtttcggaggacatgacccagccgttcgccgagcgtcgcgctgaataccatgcacgctatctggatattcagattgtgctaaaaggtcaggaagggatgaccttcagtaccctgccgcacggtacgccggacactgactggctggcggacaaagacatcgcgttcctgccggaaggcgagcaggagaaaaccgtggtgctgagcgaaggggattttgtcgtgttctggccgggcgaagtgcataagccgctgtgcgcggcgggagcgccggcgcaggtgcgtaaggttgtggtgaagatgctggtagagtaacccctcaccccggccctctcccaaggggagagggtgtaaaagttccctctccccttgggagagggttagggtgagggaaccagaccgcacccacgcataatgtgatccagcttaaacttcccgcactccctcctcatctcccatttacctgcgctttttctgcgtcatagtatgatcgttaaattaatgaacactgttctataatgtagaacaaaatgattcagcaaggagatctcatgccgcagtccgcgttgttcacgggtatcattccccctgtctccaccatttttaccgccgatggccagctcgataaaccgggtaccgccgcgctgatcgacgatctgattgctgcgggcgtcgacggcctgttcttcctgggcagcggcggcgagttctcccagctcagcgccgaagagcgtaaaaccattgcccggtttgcgatcgatcatgtcgatcgtcgcgtgccggttctgatcggcaccggcggcaccaacgcccgggaaaccattgagctgagccagcacgcgcagcaggcgggcgcggacggcatcgtggtgatcaacccttactactggaaagtgtcggaagcgaacctgatccgctatttcgagcaggtggccgacagtgtcacgctgccggtgatgctctataacttcccggcgctgaccgggcaggatctgaccccggcgctggtgaaaaccctcgccgactcgcgcagtaacatcgtcggcatcaaagacaccatcgattccgtcgctcacctgcgcagcatgatccacaccgttaaaggcgcccatcctcatttcacggtgctgtgcggctacgacgatcatctgtttaataccctgctgctaggcggcgacggggcgatctcggccagcggcaactttgccccacaggtgtcggtaaatcttctgaaagcctggcgggataacgacgtggcgaaagcggctgagtatcatcagaccctgctgcaaatcccgcagatgtatcagctggatacgccgtttgtgaacgtcattaaagaggcgatcgtgctctgcggtcgtccgatttctacgcacgtcctgccgccagcctcgccgctggacgagccgcgcaaggcgcagctgaaaaccctgttacaacagctcaaactctgctgagccggacgataacgatgaccattgagaaaattttcaccccacaggacgatgcgttttatgcggtgatcacccacgcggcggggccgcagggcacgctgccgctgaccccgcagatgctgatggaatcccccagcggcaacctgttcggtatgacgcagaacgccgggatgggctgggatgccaacaagctcaccggcaaagaggtgctgatcatcggcacccagggcggcatccgcgccggagacggacgcccggtcgcgctgggctaccacaccggacactgggagatcggcatgcagatgcaggcggcggcgaaggagatcacccgcaacggcgggatcccgttcgccgccttcgtcagcgatccgtgcgacggtcgctcgcagggcacgcacggcatgttcgactccctgccgtaccgcaacgacgcggcgatcgtgtttcgccgcctgatccgctccctgccgacgcgccgggcggtgatcggcgtggcaacctgcgataaagggctgcccgccaccatgattgcgctggcttccatgcacgatctgccgaccattctggtgccgggcggggcgacgctgccgcccaccgtgggggaagatgcgggcaaagtgcagaccatcggcgcgcgcttcgccaaccatgagctctccttgcaggaggccgccgagctgggctgtcgcgcctgcgcgtcgccgggcggcgggtgtcagttcctcggtacggcgggcacctcgcaggtagtggcggaggcactgggtctggcgctgccgcactccgcgctggccccgtccgggcaggcggtgtggctggagatcgcccgccagtcggcacgcgcggtcagtgaactggataaccgtggcatcaccacgcgcgatatcctcaccgacaaagccatcgaaaacgcgatggtgatccacgcggcgttcggcggctccaccaatttactgctgcatattccggccatcgcccacgcagcgggctgcacgatcccggacgttgaacactggacgcgcgtcaaccgcagggtgcctcgcctggtaagcgtgctgcccaacggcccggactatcacccgaccgtgcgcgccttcctcgcgggcggcgtgccggaggtgatgctccacctgcgcgatctcgggctgttgcatctggacgccatgaccgtcactggccagacagtgggcgagaacctcgactggtggcagagctcggagcgacgtaagcgcttccgccagtgcctgcgcgagcaggacggcgtggagccggatgacgtgatcctgccgccggagaaggcaaaagcgaaagggctgacctcgacggtctgcttcccgacgggcaacatcgcgccggaaggttcggtgatcaaggccacggcgatcgacccgtcggtagtgggtgaagatggcgtttaccgccacaccggccgggtgcgggtgtttgtttcggaggcgcaggcgatcagggccatcaagcgggaagagattgcgcagggcgatatcatggtggtgatcggcggcggaccgtccggcaccggcatggaggagacctaccagcttacctccgcgctgaagcatatctcgtggggcaaaacggtgtcgctcatcaccgatgcgcgcttctcgggcgtgtcgacgggcgcctgcttcggccacgtgtcgccggaggcgctggcgggcgggccgattggcaagctgcgcgacaacgacatcattgagattgccgtggaccgcctgactctgaccggtagcgtgaacttcatcggtaccgcggacaacccgctgacgccggaagagggggcgcgcgagctggcgcggcggcagacgcacccggacctgcacgctcacgactttttgccggacgatacccggctgtgggcggcattacagtccgtgagcggcggcacctggaaaggttgtatttatgacaccgataaaataattgaggtaattaacgccggtaaaaaagtactcggcctttaattaattttgagagaaaaccgtctgcgggaaatattccgcgggcggtttttgcttgtctttaatttgctaatttaaacaatgagttgagatatatcgttggcgtcacaaaagcaaaataacgtaattcagaaataagatatgaccattgctggttaattgaacagctcattacactccattaacacgatgttgtaattcagcacactacataagggtgtaattctgatgacgcaattaaccatgaaagacaaaattggctacgggctgggtgataccgcctgcggcttcgtctggcaggccacgatgttcctgctggcctatttctacaccgacgtgttcggtctctccgcaggcataatggggacgctgtttttagtttcccgcgtgctcgacgccgtgaccgatccgctgatggggctgctggtagaccgcacccgcacccgctacggccagttccgcccgttcctgctgtggggcgccatcccgtttggcatcgtctgcatgctgaccttctacacgccggacttctccgcgcagggcaaaatcatctacgcctgcgtgacctacattctgctgactctggtctacaccttcgttaacgtcccgtactgtgccatgccgggggtgatcaccgccgacccgaaagagcgtcatgcccttcagtcctggcgtttcttccttgccgccgctgggtcgctcgctatcagcggcatcgcgctgccgctggtcagcatcatcggcaaagggaacgagcaggtgggctatttcggcgccatgtgcgtgctgggtctgagcggcgtggtcctgctttatgtctgcttcttcaccaccaaagagcgctacacctttgaagtgcagccgggttcgtcggtggcgaaagatcttaagctgctgctgggcaacggccagtggcggatcatgtgcgccttcaagatgatggcgacctgctccaacgtggtgcgcggcggggcgacgctctacttcgtgaaatacgtgatggatcacccggagatggcgacccagtttttactctacggcagcctcgccaccatgttcggctcgctctgctcgtctcgtctgctgggccgcttcgaccgcgtcaccgcctttaagtggatcattgtcgcctactcgctgattagcctgctgatcttcgtcaccccggcggagcatattgcgctgattttcgccctcaacatcctgttcctgtttgtgtttaacaccaccacgccgctgcaatggctgatggcctctgacgtggtggattacgaggagagccgcagcgggcgacgcctggacgggctggtgttctccacctacctgttcagcctgaagattggcctggcgattggcggggcagtggtgggctggatcctggcgtacgtgaactactccgccagcagcagcgtgcagccggtcgaggtgctcaccaccatcaaaattctgttctgcgtggtgcccgtggtgctctatgcgggcatgttcatcatgctgtcgttttataagctcaccgacgcccgcgtggaggccatcagccagcagctgatcaagcaccgcgcggcgcagggcgaggccattcccgacgccgcgacagccgcatcccattaaccggaggcaacatggaaatcactaacccgatactcaccggcttcaacccggacccgtccctgtgccgccagggcgaggactactacatcgccacctcgaccttcgagtggttcccgggcgtgcgcatctatcactcccgcgacctgaaaaactggacgctggtcagcacgccgctggaccgcgtgtcgatgctggacatgaagggcaatccggactccggcggcatctgggcgccgtgcctgagctacgccgacggcaaattctggctgctctataccgacgtgaagattgtcgattcgccgtggaaaaatggccgcaacttcctcgtcaccgcgccgtccattgaggggccatggagcgagccggtcccgatgggcaacggcgggttcgatccgtccctgttccacgacgacgatggccgcaaatactacctctaccgcccgtgggggccgcgccatcacagcaacccgcacaacaccatcgtgatgcaggagtttgacccgcagaccggcaccctctcgcccgagcgcaaaacgctgtttaccggcacgccgctctgctacaccgaaggggcgcatctttatcgccacgcgggatggtactacctgatggttgccgaaggcggcaccagctacgagcacgccgtcgtggtgctgcgtgcaaaaaccatcgacgggccgtacgagcttcacccggacgtgacgatgatgaccagctggcacctgccggagaacccgctgcaaaagagcggccacggctcgctgctgcaaacccacaccggggagtggtatatggcctaccttaccagccgcccgctgcgcctgcccggcgtgccgctgctggcctccggcggacgcggctactgtccgctggggcgcgagaccggcattgcccgcattgaatggcgcgatggctggccgtacgtggaaggcggcaagcacgcgcagctgaccgtgaaaggcccgcaggtggcggagcagcccgccgccgtgcagggtagctggcgggatgatttcgacggcagcacgcttgaccctgaattgcagactctgcgcattccgttcgacgacactctcggctcactcaccgcgcgccccggctatttacggctctacggcaacgactcgctcaactcgacctttacccagtcgaccgtggcgcgccgctggcagcacttcaccttccgggccgagacgcggatgcagttctcgccggtgcacttccagcagagcgcggggctgacctgctactacaacagcaaaaactggagctactgctttgtggactacgaggaggggcagggcagaacgattaaggttattcagctcgaccacaacgtgccgtcgtggccgctgcacgagcagcccattcccgtgccggagagtgcgaagagcgtctggctaagggtggatgtggatgcgctggtctaccgctacagctactcgttcgacggcgagacgtggcacaccgtgccggtgacgtatgaggcgtggaagctgtcggatgactatatcggcgggcgcggcttcttcaccggcgcgtttgtgggactgcactgcgaggacatcagcggcgacggctgccacgcggacttcgactacttcacctacgagccggtctgacggctcaggccgggtagcccagcgcgcgtgagagctggagcccggcctgctgaagctgctcgcggaaattagccagctcagcgtcgtccacgcgggaggtcagcgtcgacaggctcagggcggcaatgacgcgggactcgtggttccacaccggcaccgccacgcagcgcacgccctgctcgttctcttcgctatccagggcatagccctgctcgcgggtctgcgccagggcactcattagtgcttcacgagaggcgagggtggaaggcgtaaaggtaatgtactgatagccctccagcagggcgttcagctcgggctcgcccagccaggcaatcaacaccttgccgatggcggtggcgtgaaccggcaggcggcggccgatgcgcgaataggcgatggcggccagcttgccttcaatcttctcgatatagaccccttcacgcccgtccaggatccccagatgggtcgtctgcccggtccgccgggacagctccgtcagccagcctttcgccttctgccgaatatccatcgagcccacgacaaaatgcccgcgctcgaccagcttcatgccgaggcgatacttaccgttctccgggttctgatcgatatagccgtgaagctggagggttttcagcagcgagtggagggtactcttgctcagccccatcagcttgctgatgtcggtgatcttaagctcggtggcctgctcgttgaacaggtcgaggatctgcaacgcacgttcaacagactgaataatcggcataatgctggtatgtccacgctggaattaaggcgaaaacgtacctttttcggggtgaaaaatcaatgaaatggagccggtttgctccctctccccgtgggagagggccggggtgagggcatcaggccgcatcgtcgcctgattcgcccggcggcgctacgcttgcacgggcctacgggttttgtaggccgggtaagcgcagcgccacccggcaagaagagcgcaccgaatcaatgtgggagaaaggatcactccccaagcgtcgccaccatcaccgccttaatcgtatgcatccggttttccgcctggtcgaacacgatgctcgccggcgactcaaacacctcgtccgtcacttccatcccgccgtgcagatcgaactctttcgccatctgcttgccgagcgtggtctggtcgtcatggaacgccggcagacagtgcaggaacttcacgtccgggttgccggtcagcgccatcatctgcgcgtttacctgatacccacgcagcagcgcaattcgctccgcccacttctctttggcttcgcccatcgacacccacacgtcggtatagataaagtgcgcgcccttcacgcccgccgccacgtcttccgtcagggtgattttcccgccgtgcttttccgccagcgcgctgcactctgccaccaggctctcttccggccagcaggccttcggggccaccaggcgcagatccagccccgtcagcgccgccgcttctagcatcgagtagcccatgttgttgcgcgcgtcgcccgcgtagaccagcgtcatctcgttaaacgccttgcccggcaggtgctcctgcatggtcagcaggtccgccagcagctgcgtcgggtggaactcgttggtcagcccgttccataccggcacgcccgcatactgcgccagcgtttcgacgacttcctggccgtgcccgcgatactgaatgccgtcgtacatccgcccgagcacgcgcgcggtgtccttaattgactctttatgcccaatctggctgccgctcggccctaaataggtaacgcgagcgccctggtcaaatgcggcaacttcgaaagagcaacgggtacgggtcgagtctttttcgaagatgagcgcgatgtttttaccggtaagcttctgtacttccttgccattttttttatcggctttgagctgtgcggcaagggtcagcagagaggtgaactgtgcaggggtaaaatcgagcaatttcagaaagtgtttcttgtacagatcagacattttatcctcgcatggcgaatgccacttattgaattaaaattcactttatatgtgtaattattcatttgcaaccccgtttcacaaatctttctaacaaaggtggaggcaaacccgtccgtgtgtgaaaatagaagtatctgccgcactttaaagaggattgagccatggcaaacccggaacacctggaagagcaacgcgaagagacgcgtctgattattgaagaactgctggaagacggtagcgatccggacgcgctgtacaccatcgaacaccatttctctgcggacgactttgaagcgctggaaaaaatggccgtggaagccttcaagctgggttacgaagtgaccgagccggaagagctggaagtggaagagggcgacaccgtcatctgctgcgacatcctgagcgaaggcgcgctgaaggcggaactgatcgacgcgcaggtagaacagctgatgaacctggccgagaagtttgaagtggaatacgacggctggggaacctacttcgaagatccgaacggtgaagacggcgaagaaggcgacgacgaagattacgtcgacgaagacgacgacggcgtgcgtcactaagtgtttcaggcggtggcgcgcgccaccgctttttcaaggcagaaccatggattacccgcagatactcgcccccgtactcaacttcctccagtgcccgaccccgcaagcatggattgataaagcccgcgacccggcgaacctgccgctgctgctcactgaccacatggtgtgcgagctcaaggccgcccagaccgcgctgctgctggtgcgtaaatacgtcgccgacgaaagcggtgccgacgcgctactcgagtggctcaaaccctacgaacagttcacctttcgcgacggcccggagccggacttcatcgccctgcacaagcagattggcaaaagcgtgatgcccaaaaccgacgacccgtggggccaggcgctcatcgacagcatggtgctgctgattaaagaggagctgcaccatttctggcaggtgcgtgaggcgatgctggcccgcgacattccgtacgtcaaaatcaccgccagccgctacgccaaagggatgctgaaggacgtgcgcactcacgaaccgctgacgctgatcgacaagctcatctgtggtgcctacatcgaagcccgctcctgcgaacgcttcgccgcgctggccccgttcctcgacgacgacctgcagaagttctatctctcgctgctgcgctcggaagcgcgccattatcaggactacctgacgctggcccagcaggtgagcgacgacgatatctcaccgcgtataaagctttttggcgaaattgaagccacacttatctcgacaccggaccacgagtttcgcttccacagcggcgtgccggtgtaaaccggcacaactcaaggataaggatgcgagatgaaaaaaacgtggatcagtacggtcgttgttattgtcgcggccgccgccgtggcgttctgggtgttctttgacaggcaacgcgctccggaagcgcagattgataccaccctcaacgcgatgcccgcctggcaggtgatcaaggagcaggagcctgtgctgcatcagcgcatcctcgaccagatggccgccctgcaaaaggccggcgagccggagcagcagattatcgacaccatccagccgcagattctgcatttgcagatgtcgcgtctgcaaaacgccccggacgccaacgtggtgaactacatgaccatcaatatggagcagaccgccgccatccagaaggtgagcgacgacgcctgcttccgcttcctctacccgacggtgaagggcggcgtgaatccgatgcgcatgctggataaagacctgatgacgcggcgcatgcaggccgacgccgacatgatgcgcgcggcctacggcaaaaaccgccacaccgtgacgcaagccgaacgcgaggcggctgtcgaggatgtccggccgattatgaaacaactagccgataagtacggcgaggacatccagctgttgcagatgccggagaaggcggtgggcaaggagaagctctcctgcgacatggtgcaggagatgtgggcgaaggtgctggcgctgccggagcagaaggcggcaggggtgattcggctggcggtgtctgagctggagtgacgaagggcgctggttttttgggcacttagcgcgggtttcgcgcgtcgtcgcttgcatggcggcgcgcgacaggtataatccacaacgtttccgcatccccttcagtgccgaagtggcgaaatcggtagacgcagttgattcaaaatcaaccgtagaaatacgtgccggttcgagtccggccttcggcaccattagtacttccaataccatccgagaaagtccacgaaaccctttaaaatcaatggttgcagcgatttttccgtcccgagttgtccgaggtagtccgttgaaatcaggacgtcattgggggcataattgggggcatcttaacttcgattagtaatgtgcccccaaatgaagctcaacgccagacaggtcgagaccgcaaagccaaaagacaaaacctacaaaatggccgatggcggcggtttgtatctcgaggtttcggccaagggttctaaatactggcgcatgaaataccgacgcccctctgacaaaaaagaggatcgcctcgcttttggtgtttggcctactgtgacgcttgctcaggcaagagcaaaacgcgacgaagctaaaaagctcttagtgcagggtatagaccccaaagccgaacagaaagaagctcaggccgagaattcgggggaatatactttcgagactatcggtcgtgaatggcatgccagtaacaagcgctggagtgaagatcaccgatcacgcgttctacgctatcttgagctttatatcttccctcatatcggttcgtccgacattcgccagctcaaaaccagccacctgttagccccgattaaaaaagttgatgccagtggtaaacacgacgttgctcagcgcctgcaacagcgcgttacggccattatgcgttatgccgtacagaacgattacatcgactcaaatccagccagtgatatggccggtgcgctatctacaaccaaagcgcgacattaccctgctttaccctctagccgattccctgagtttcttgctcgtcttgctgcttatcgtggccgtgtaatgacacgaatcgcggtcgagctttccttactaacttttgtgcgttccagtgagttacgtttcgcgcgttgggatgagttcgacttcgataaatctctctggcgtgtacctgcaaaacgagaagagattaaaggcgtgcgttactcgtaccgtggcatgaagatgaaagaggaacatatcgttccgcttagtcggcaggcgatgattttgttagagcagcttaagcagattagtggcgataaaaagttactttttccgggtgaccatgacacaactaaggttatgagtgaaaatacggttaacagcgcattgcgtgcgatgggatatgacactaaaaccgaggtttgcgggcatgggtttaggacgatggcgcgtggtgcgttgggtgagtcagggttatggagcgatgatgcgattgaacgacaattgagccacacagagcgtaacaatgtgcgtgcggcttacatacatacttctgagcatttggatgaacgccgtttaatggtgcaatggtgggctgattatttagatgtaaaccgcgacttacatgtaacaccttatgattttgcaaataataagtaatttacatagccccctctcatttgtgagagggggctatatttattcttcacttcctaattgaccagtaataattctttcaaattttaatattaatttactgatttctgggtctgatgttctctcttcagcttgttttagccttgttatagcatcatcaaatacagttatatcttttgattttctataaagttcgagcccaagagaacaataagaacttaagatatatttatgatcaggatagcgctgcaaagcaatgatggctactttctctgcttcccttaagattgtaatccgatcttcagtcatgattcctggggtattaactgctcttgccgtcagaagagaaactttgtatcgcataattgcactgtcagatctaaaatctttgtcaaaaattctaatttctgtttctgctttatcaaactcacccaaatcaatcatatttcgaattagtcggtgtctaggcaatctttctccaggcgctattgatatcattttacgcaacagtcggttttgcgctgttttgtctgaaatcctctgtaagccattttctatgttacaaagttctctaattgtgcggatttctatatcatatgttggtgaaatacaatcaatgactttgtcaaataatgatattatatctgaagtgtccgagtacttgtattttgcaattatgtctactattactgaatgccgccctctccaaccataaataccctctcgttcactgacggtatattcgtttataatctctgagagattaactaagatagcctgaatagcatcgctagggatgcttagcagtctgatgatcaactgtctatgaacccttactcctgcactttccattgcggctacaattttatatatctcttgaagttccgatgataaatgtgcatattctcgtaaaataatgtcatcaaatttttcagaggcaaatatatttttcaagcaaacaaacatatcagactcacatctaacggctaagcgcctttttctttctggcctggagaaaccactaaaattctcctcagttaaccctctcattgttgtattgttttctatcaggaacaagagtcgatctatctcttcactagatagttgagacaggctaacatctttaccatgtttgtatatattaggcgttttgatgcgaggattccaaagattcttcgatgaagcacaaattatcttcaaattagaaatattatcagaacgtaatctatcaattaattcgttaattgcgtttaattgagaatgagcttcatctataaacaaaatacctattttatcattttttacaagctctttacttacgtctagccaggctagagcttctaaattaaaatcatttttatgctcccagcaaatgatccctttatcaacgcatctaactagcatttgtctagcggcggttgtttttccaacaccactagctccaagaattatgagagaggtaatatcttgcgaggatataagttggtcactcaaccctataatatcgcgctcaaacgtcaatcctgatttaatatctgaataaagtgctggccatccattgaacattgcaatcgcatcaccttctccagccattaaatgattaacatcttgagtggtggctcttaactgaatagtattgtaaaagtaatcttgatcgtttctttgtggcccaacctgaggtttagcagctgctaactccgcaaaaaagtcatcaatgcctccgaagcaaactttaaatcctctcttctcataaagcatagccctgttatcatcacggctataaagaaataaagaaactttaccaatcccggaaattgcatttatgttggctgttttttcaataagttctttaatgtgagcatctgctagagaatggcctattattattaaatgagagtcactaatatcatttttaaatctatcccagagtttttccctatattcgacagtttgatcgtaatctccgtcactaattattatcctagactgaatgccgtcaactatatccttatctatcgtgccgtgtaatttgaagtattttaaagtgtccgcccccccggcacttgaaaagtcaaagttggatgaaatgggtcttattcttttttgggaggaattataactctgttcaattaactcatcatagtttgtggtgtatatcgacttccagtcatatagtggagtattgagtattccaccagtaggtttaagatcttcaaacatctttcttaattcggtgatcatctcatatctggtatatttggtttccagtatgcttgtgaactctctaagggtatatccatttgcatcttctttaaatctagcagccagttttctaattattccttccacgctaggtgctctagatggaattgatgaacccgcaccaaaaaataaaacggttttttcaggcgttatgtcatgtactaattgtttaatgtctataggcatattaaatccatttggctttagcttatattggcggttttatatttcttacaatcttaaatctatttttgacacaaatagactatttattcctttaatagtgatatatgtttctgaactttgatatagatcacgttacactaatctaagctctggcgcgcaatgctctccccgccccgcctgcccgcttaagggggcgcttttaatgcaggtgcatgaacggcctcagggcccgccagtgctggcgctggcgggcgattcagtgtcggtaaaacgcatgcaaaaccatgcaccttatgaatgcatggcttttatacgtaaaaataaagggattttcgtggatttttaagcggactactgcacggccagttctgcacggcggcgggtgtaattcaggttctgtgcaggtgtgaatttttcacgattatcatcgcgcgaagccgcttcaggcctgaatccgatggccgttaaaatgtcattgtcctgcgccgaataattaattttttcaccggcggccagccagacctgtagcgcctcacgcagacagtcgagtgagtgctgcatggcgcagcgctgaatggcggggtgttgcccgggataattcatcagttcaggggcgagggcggcggccagctccgcgccgtgcgcctgcataaaatcatttaatcggtcgcggatgctgatgcgctgcacctcctcatgcgagcggatatagcgaccggcagcctgattaatttcccattttttcacgtcaataatttcacgtagcgtttgcaggctccggccgctgtgcccgctgccggcaagctgttcgcggtatgcctgttcggcctgcgtcagttcttccctgcgttgcagccaggcggttttgtttgcctgacaggtctcaaaggctttctgtagcgtcagtgtggtcacgtatgtttctcctgatgactggccgtgcttacgcaccggcacggttaacggtggccgccggtgcgggtacagggatgaccggctctgttaccggtgaacgaataaccccgtcgatggattcaagcgtgcggaacgtggccgagcactcgatgttcatgcactggtgatagcgctgtttgacgttatcggacagataccgacttgtgcgggaatgtgcgctggttttgcagaacggacagtgaaacatgcttactcctccgcttttgcctcgccattttcagccagttttctggcgagcatcattctcttcgcagggctgcgtaacagctccgtatcaacgtcagtaatctgcggccggtgcatgcccgtcacggacaacaccggctcctgcgtcatatcgaagtgatacaggctgccctgacggctcagcgcatcgcgcagctcgccagtggccacggactgcggggcgctttctcccttcatttcgagggcacgaatgcgcagcaggaaagcgcggatgagggtgacaggaaccgcattgacagcctgagcccattccgcaccggcgtaagcggtaaaggcatcttcatgcgctgaaaggtatttattgccggtggagcaggcattcagcatggtgcgtgtccggtcgttctccagctccgctatcagaccggtgaactcgtcggccagctcgcgactggcgatacgcctgctgtgctcagctttcatttcaggggtgagactgccgcgcagggtgcgaaagcggctgcgccagtcctgctcagcctctgcgctctcattgagggcggtctgtcgctcctgcttacagcgttcaatggacttatcaatctctttcagtacctgcatgctggccgcgtgcgtgtctctggccgcagtgaatgtgctcagcttgtcggtgatgtgctggctgttctctgcggactgcttggcggcaacatcttgcagggcggtgatgagtgtttcgggtttcatgttcaggctctccatttattcaacatgaaatgattctgcccttcatcacacaacatctcgattcattgcagttgtggcagttctggcacaaacagcacttaaaatcctgcttgccagagaaaggtctcagcaaaaccttactcatcgtttgtttttttacttataactgttcaccactgttcaccttaaataaaaatataagtaatacagtaagataaatggtgaacagttgagggtctgactgttcaccgtctgttcaccactgttcaccccctgttttttcagccagtcacttgtttagactttttaacgattaaaaaaaagaaatacataagtaaaagtaatcatgaatttgccaaagaattatcaaggattgccagcgattgtcagagattgccactgtttgtcattcacttgttaacggtttgttatatgacatttcgctgcaaaatgacttgttgccctgaaggaaaatattcacaaaatagagagctacccgaagccggacggacacgtccggcactgtatggactttgtgaggtagcccgatgcacactgctttttcttctccgtcttctgcccctgccgcgccactgatgccggtttctgatgccgttcaggagcgctttatccgcctgcccgaagtgatgcacatgtgcggtctgtcgcggtcgactatttacgacctcatcagccgggaggctttcccgaaacaaatctccctcggcggtaaaaacgtggcatgggcgcagtctgaaatcaccgcatggatggcagatcgcattgccgaacgcaaccggggctgtgacgcatgatgatgactgttcagcaaaccacccctttttctggcttgcttcctgtcgccgtttccaggtatagttttcccgctgtcgcaaaatcggcagccgggcgtaggaacccgagttacttattggcgacaccagacgcgccatgcgtctttttttacgtcgttgctcaggcacacccatttttcgggctgtggtgcttacaccttagcccctgtcagataatggtggtccgggcggggcagccttcgggctggccggtttccaataaggccggtattcctacccccgtccgggtcaccacccatgagcgtaggaactccggtggtggcaataaccgctacttattggaggttgcccctatggctacaaccctcaccccgtcacacccgcagtttgtctttgtgtttgccgccgttcgtcgcgcagaccgtaaaccccgtatctgtatgctccgcaccgttgccggtgatgaacacgccgcacgcctttcactcgttcgcgattacgtcctctcgtttgccggtcgtctgccggttgcggaggtgcgtgcatgagacacaccaccattacctcccgtgacctcgaatgccttgagcacatgcgcaacgtcggccagctcgtcaatgagctgatgcaggttcaggactgcaccaccgttcgtcgtgacccnnnnnnnnnnnnnnnnnnnnnnnnnnnnnnnnnnnnnnnnnnnnnnnnnnnnnnnnnnnnnnnnnnnnnnnnnnnnnnnnnnnnnnnnnnnnnnnnnnnnnnnnnnnnnnnnnnnnnnnnnnnnnnnnnnnnnnnnnnnnnnnnnnnnnnnnnnnnnnnnnnnnnnnnnnnnnnnnnnnnnnnnnnnnnnnnnnnnnnnnnnnnnnnnnnnnnnnnnnnnnnnnnnnnnnnnnnnnnnnnnnnnnnnnnnnnnnnnnnnnnnnnnnnnnnnnnnnnnnnnnnnnnnnnnnnnnnnnnnnnnnnnnnnnnnnnnnnnnnnnnnnnnnnnnnnnnnnnnnnnnnnnnnnnnnnnnnnnnnnnnnnnnnnnnnnnnnnnnnnnnnnnnnnnnnnnnnnnnnnnnnnnnnnnnnnnnnnnnnnnnnnnnnnnnnnnnnnnnnnnnnnnnnnnnnnnnnnnnnnnnnnnnnnnnnnnnnnnnnnnnnnnnnnnnnnnnnnnnnnnnnnnnnnnnnnnnnnnnnnnnnnnnnnnnnnnnnnnnnnnnnnnnnnnnnnnnnnnnnnnnnnnnnnnnnnnnnnnnnnnnnnnnnnnnnnnnnnnnnnnnnnnnnnnnnnnnnnnnnnnnnnnnnnnnnnnnnnnnnnnnnnnnnnnnnnnnnnnnnnnnnnnnnnnnnnnnnnnnnnnnnnnnnnnnnnnnnnnnnnnnnnnnnnnnnnnnnnnnnnnnnnnnnnnnnnnnnnnnnnnnnnnnnnnnnnnnnnnnnnnnnnnnnnnnnnnnnnnnnnnnnnnnnnnnnnnnnnnnnnnnnnnnnnnnnnnnnnnnnnnnnnnnnnnnnnnnnnnnnnnnnnnnnnnnnnnnnnnnnnnnnnnnnnnnnnnnnnnnnnnnnnnnnnnnnnnnnnnnnnnnnnnnnnnnnnnnnnnnnnnnnnnnnnnnnnnnnnnnnnnnnnnnnnnnnnnnnnnnnnnnnnnnnnnnnnnnnnnnnnnnnnnnnnnnnnnnnnnnnnnnnnnnnnnnnnnnnnnnnnnnnnnnnnnnnnnnnnnnnnnnnnnnnnnnnnnnnnnnnnnnnnnnnnnnnnnnnnnnnnnnnnnnnnnnnnnnnnnnnnnnnnnnnnnnnnnnnnnnnnnnnnnnnnnnnnnnnnnnnnnnnnnnnnnnnnnnnnnnnnnnnnnnnnnnnnnnnnnnnnnnnnnnnnnnnnnnnnnnnnnnnnnnnnnnnnnnnnnnnnnnnnnnnnnnnnnnnnnnnnnnnnnnnnnnnnnnnnnnnnnnnnnnnnnnnnnnnnnnnnnnnnnnnnnnnnnnnnnnnnnnnnnnnnnnnnnnnnnnnnnnnnnnnnnnnnnnnnnnnnnnnnnnnnnnnnnnnnnnnnnnnnnnnnnnnnnnnnnnnnnnnnnnnnnnnnnnnnnnnnnnnnnnnnnnnnnnnnnnnnnnnnnnnnnnnnnnnnnnnnnnnnnnnnnnnnnnnnnnnnnnnnnnnnnnnnnnnnnnnnnnnnnnnnnnnnnnnnnnnnnnnnnnnnnnnnnnnnnnnnnnnnnnnnnnnnnnnnnnnnnnnnnnnnnnnnnnnnnnnnnnnnnnnnnnnnnnnnnnnnnnnnnnnnnnnnnnnnnnnnnnnnnnnnnnnnnnnnnnnnnnnnnnnnnnnnnnnnnnnnnnnnnnnnnnnnnnnnnnnnnnnnnnnnnnnnnnnnnnnnnnnnnnnnnnnnnnnnnnnnnnnnnnnnnnnnnnnnnnnnnnnnnnnnnnnnnnnnnnnnnnnnnnnnnnnnnnnnnnnnnnnnnnnnnnnnnnnnnnnnnnnnnnnnnnnnnnnnnnnnnnnnnnnnnnnnnnnnnnnnnnnnnnnnnnnnnnnnnnnnnnnnnnnnnnnnnnnnnnnnnnnnnnnnncactgttcacccttcaccgtatattcaccctgtatcactatgaaagtattaataaaaaaccaaaggtgaacagtgtgaacagttaaacccaaaaaaactttttaccccccctcatcaccatcgtattgcggtgatggtcgccggaaactggccagaaacgcgctgaggtgaagagttgactgttcactcatcaccaaccgttcaccatctatcactatgatattaaaaagaaaaacaaggaggtgaacagtgtgaacagttaaatgcaaaaaaactttttttgcgtatgatgttgctatgcaacttcatgagaagatttaagcagtggacaagaccagagatttcattctagaaggactctcccgctttgacttggctgatttgcctggtcgaccttatgactgcgcttttgacctcttggctgcaacgccatcgagaaaaaggctgattatgatgggctttaatggctcgttagctgattcatgcatgactaaccgccagtctattctgcaagattatgaacatccttttatttcaggtattcaagaagggatacaaggaaaatgggggatcactcatcttgctaaaagactccagcaaataccttcttgcctcggttatagctgggaagatgttatttataccaacgcattaatgatgtgttctcagaatgctgcaaccctgaaaaaagaagcagctcgtcacgagatgacaatgaatgaaatcgaagcaaactcaatggcattttttgagcatgtaacagcccatttgagcgaaccagatttgatcgttgcatatagcaacagtctccagtcactctcagccgcgagtttgttgctaaagcactttggcgatgcaactactctcaaattttctcagccgaaaggctaccacactactttcgcatttatggccaatcttaacagtagaaatattccggttatctgcgtgcgacacatgtcacgatttaaacctgaagagagttatatcagggcggctgtcaaattaatgggttgttaagttttgttctggtaaggatccgcatgacggaacctaaccggtaagaataactatccataaaaggtatatgcttcaactcgttatccatacaatggcaacaaaacggctgggggcacaaaaaggggcatatttttgagttagcaatattaaattcttttgtatcaattggttatattgtgttttgagtccggccttcgcaccaaaagcatgtaaatggacctcaactgaggtctttttttatgtctaaaatccgatatttacccacttttcccgctatattaactctctcaaggtcaaccgacatcaacgtacatctaccaacacctgttggtacagatgatggtatttccgattcgataatgcttgtaccaacagggaggggataagcatggctctaacagatatcaaagtcagaacagccaagccaatggataagcaatataagctgaccgatggcaacggtatgcatcttctcgtccatcctaatggttctaagtactggcgtttgcagtaccgttttgacggcaagcaaaagatgctggcacttggggtatatcctgaaatcacattggcggatgctagatcacgccgcgacgaagcgcgtaagctgttggcgaatggcgtcgatccaggagacaaaaagaaaagtgataaggttgagcagagaaaagcccatacttttaaagaggtggcgattgagtggcatagcaccaataaaaagtggtctgaagatcatgcccatcgtgtgctaaaaagcctggaagataatctcttcgcagagttcggggagcgtaatatcacggaattaaagactcgcgatttattagcacctattaaagccgtggagatgtctggacgtcttgaggttgctgcccgtcttcaacagcgaaccacagcaatcatgcgttatgctgtgcagagtggattgattataaccccgctcaggagatggctggggcagttgcttctggaaacaggcaacatcgtccggcactggagttaaagcgcatccctgagttacttgagaaaatagatggctataccggcaggccgctaacctgctgggcaacagaacttactttgcttatctttattcgctccagtgagctgcgttttgctcgctggtcnnnnnnnnnnnnnnnnnnnnnnnnnnnnnnnnnnnnnnnnnnnnnnnnnnnnnnnnnnnnnnnnnnnnnnnnnnnnnnnnnnnnnnnnnnnnnnnnnnnnnnnnnnnnnnnnnnnnnnnnnnnnnnnnnnnnnnnnnnnnnnnnnnnnnnnnnnnnnnnnnnnnnnnnnnnnnnnnnnnnnnnnnnnnnnnnnnnnnnnnnnnnnnnnnnnnnnnnnnnnnnnnnnnnnnnnnnnnnnnnnnnnnnnnnnnnnnnnnnnnnnnnnnnnnnnnnnnnnnnnnnnnnnnnnnnnnnnnnnnnnnnnnnnnnnnnnnnnnnnnnnnnnnnnnnnnnnnnnnnnnnnnnnnnnnnnnnnnnnnnnnnnnnnnnnnnnnnnnnnnnnnnnnnnnnnnnnnnnnnnnnnnnnnnnnnnnnnnnnnnnnnnnnnnnnnnnnnnnnnnnnnnnnnnnnnnnnnnnnnnnnnnnnnnnnnnnnnnnnnnnnnnnnnnnnnnnnnnnnnnnnnnnnnnnnnnnnnnnnnnncaggcattggcgatcctgaaacagataaaacagttttgtggggagcacgagctgattttcattggcgatcacgacccgcgtaaacccatgagtgaaaacacggttaacagtgccctacgggttatgggttacgacactaaagctgaggtttgcggtcacggctttcgtacaatggcctgtagttcgttaattgagtcagggctatggtcgaaggatgcggttgaaaggcagatgagccatatggaacgcaattcggtgcgggcggcgtatatccataaagcggaacatctggaagagcgcaagttgatgttgcagtggtgggctgattttgtggatgcgaaccgggagaaagggattacgccgtttgactatgcgacgatcaaccggggagcaggtcacaggaggaacatatccaaaacaggcagatacacaatttaaattacagtctctttcatcgatttttgtccattatgatgacactctatattcgtattgaaatcacagtaatacagtgcattttttagtaatatttaacctattgattatttcaaggaataatgaccgttgaaatttgcacaagctctcagcattctctcaaagtcttcaccgtatgcggtcagtaccgagagagagcactatcaagatcacctcgttggattcaagagatacatatacatcacgacagatatagaagcggattttaaaaaagcactcctatctgctaagtccaatcaagtcatcttcctatgcggaagtagtggtgatggcaagtctgagatcttgacgcagtacagccaaaagcacaaagtgactcatgacttccatttggatgcgactcacagcttcaatccaagccagacagccattcaagctcttgatcaaagattcacccagttcaagcaaagtcataaaccacttgttgtgggtattaacgttggtatgctcggcaattatgcagaagaaggttccaaagagcatagcgacatcaaaaaggtgctcagagactttctctctcgtaagcgatcagcaattccaaagcagtacgtattcttggattttgaagactatccaaaattcaccttcaatgctgagggctgtgcatcagactttgcagaaaaatttctaaaaagattgacagcacaaacgcttgagaatcctttctatgcgctttatgacaaagagctcaaatctctaggtcatactcgcctgacggcaaactatgcgctgctgagtcgcccttcagttcaggaatctctgatcggcttattactcaaagcccgtcttatcaaagatcagttcctcacggcccgagcgttactggatttcattttccagttgctcgctgcggatggctacttgttcgacaacttgtttgcaggcagtgataacgagctgttatcccgtatacagggttttgacccaagtaatctgcacacgcgcaccgtcgatgagtttgtgcttcagcatgagctgggcattgaagatgagcgtttcaatgcgtttagatctaaaattaacgagcttggtttttacgaggtaaccaaagcaacgtcttttctgcgccttttctatttgcttcggggtgacaaagagctcagcaatgagtttgtaacgcctatccaaaacgagttcacaaacaatctggtagaaacctatgcatctgtctggatgcgacatcgtgatttcgatggttcaggaaagatgcgcaaactgcttggcagtttctacaaagaaacgctgatcgcagcgcttcacagctattgtaatcgtcatgccccaacactcgacaaagacgagtatttagtttctgagcttaatggctacaaaacggcggtgtctcttgaagttaaggccgatttttcagcaatacaaaacagtacactcgaaaaaataggcaccttcaatgtgtatctgaaagtcgatgaacaatcgcttaagccaatgccaattagcgtcaaactacttgagcttttggtcaagattgggcaggggtatcgccctaacaagcacgacaaaaatgctgttttgttacttgatgaagcattggaacagatgctgacagtagctaagcaaaaagagaccttttttattctcaagggtgataagcgctacaaaatcgtgaaagaagaaagtgactattttgaagtgagtggtatgcactaatgacgaccgataatttcacattaccgataaaggccggtttgccacaaacggtagctgataagttccaaaataagaatacgttgagcagttacattcccattcgtacgcaaggcaatgattttgactggtcatcagtcgtgggcttagtcctgcgtggattactttgtaaaaaaatagaaaagtacaattaccaagattttactgcggattgcaaaaacaacttacaaaacaaattgggtgaagaggcattttggagtgtacttgaagatatgtatttcactaatgaaaatatattctcggtaacccctgagtttctgttgtttaagagccagaagagtcaagataacaagtacacgcgcgacatgcgaatggcatccttgtttattaacttacttcaaggacagcaaattgaacgatttgaatctaacttgaacttcctcgaagaggagtttcttaaaacgcttttagacaaaacaaagtcagatcgtgacaaggacttccaggtgaccgagtcaccatatttgccctatatagcagaggcgtttaaacgtgacctcgagtttttaactggttatccgaaatacctgttggatgagttcgagcgtttcttggcattctatggctttgcttacacggctcaattaagcctatcgttgtcggattggaaaacaggtgaagccccaaccgcgaaaccgctgtatttcatcatggatcatgagcgcgccagcagtgaacgtatccatatcaaaaagcacggttacaagctttttagcgaatcgtctttcaagctgtttcccttcctctctatgctggaaaatcttcaaccaaacccagaaaaattaaaaaacctttgtggcaattggcaaaggatattaagagttcagagcggagtgatctagctgagtatattgaaaattacgcaaaaatgtttcgccacaacagaaaacttgaaacagcaatacctgaaaaagcagaaaccgcaattgattggttggaatatgctttgaagcttgctgaagaacagttcagagaccctaaaaccgaccgtccggggactatcaaaaaatatattaaagcggttgaagaaaacatggctactggcttcgtgcaagctcgtggtcgctctggtcgggtgttagtactcactcaagaccacattattttgcttactaacctggtggtgggtaaggaagaaaagcttcgcttccatgagctgataattggcttacagcaaagggggatttttgttgataagcagacagaacaagagcttattaagttctatgagcgaattggcaacgttgaacgcatgagtgatagtggagatgcagtgtatgtgcgcaaaacaatttgaatcgtttctggttgagcagtttttactgcacgcgaaaggaaacatccgcgcaggctatcgctaccagtttaactctcctgaccatgctaatagtcagcgacttttcgatgcgctcttagcgcgaaaaggaggagagagcgaagatcgcaatggtgtagcgctgagctatttagacctagaagactgcaaagtggtgccagtgcttcatagcgaagatgcgtgtgaaacgggctttaccgaaaactacatctctaatttgcgtgacgaaatagcaagccaggaaggtccgttgaagggctgtgcactggtggtgattcacaatagtcgcctagatactctcatcaactcggcggaagatcttggccagtctggccaggtgtggagtccagggaacatcaaattcgctcttagtggctttattgagcaatctgacaaatctcgagacgtttcgctttgccttttggacgaccaatttgacgcgattttggaagatggtgcgaccatgttcggtttcgagtctttatacaaggcagttgaggatggcgagctgtgtttcagcgagctaggcatgtttgaggatccttttgttgctgagttatcgggcaataaaaaacagatcaaacagcgcctagaagaaaaccgtacgctttaccaagagttgtcgtttgaagtagagcattttggtcagcaactcgaagaaaggctgaaaggctttagtagtaggtttatcaaagaacatttttctgacgatggttggaaagatgtggagtttgaaacttatcgagaagagatcaaaaggaataagattcagaaccttaagcatgaaggtgaagacgagaccaataatgcgcaagtgattggtcgctacccaaaagaaactaaagcaggattgcgtgaccgtcacttgattattgcactggaagaagggcaaagtgagtttgaacttaaactgagcttttctggcatcagcgatttaagaaaagagcagtttaaagtctcgccagcgaatgcacttggcaaacaagaagtcatcagcacgcgcctaactagtaaaggggcaaacgctactctagcagctagttatgccaatgagcctttgtttttcacgctagcattgaagcgtgacaatacctctgaacaccataacttccgttgcttggttgtcagaaaaggcgagtttcacctcgaggcattcaaaaacattttcgccgttgagccttcaaaaaaacgccttaccttgaaaacggtagacaacagcttggttattaacccggcgctaactgcaaaccgaagcctagatgatgtcggtgaagtggttgacctcgcagaatttggtgttgtcgattttgaatctttggccaacgagtcagaagaaatcagctttgtggtgaaatcaggtgataattccctgacattttatattgagggtgaacaggtagaaagcagcctgtccttcccattgctgcttaaccaatctcgcttccacaaattgtttgacgatcacgtgtttggcgagctttatccgagtaaagacgttgtcgcgatcgatcatagtgaatttcgcgtcatggagccgcgcattagcctacttcgttgggaagagtgtttcgtccagcaaaagcaagtctacctagcggaatccaacagcatggcgttggaacagttaaggtctattgatgacggtcttcactcagcataccaagcactgtttgactatctagcgagccgacgaacaactatttctttggtttcgtgggggcctatatttacggcactcgtgaaagcgaccgtggatgcattccttgattatttcaacgcgatcccaactggtggcatgcttaccaaagagcaaaagcttgtgatgcaaatcggtttggttcgcgagaatggtgaagaatattactcgccattccacccaatggtgttggcttactacttaaatctttgtaatgaaatgcaaaaagatgacagctttgctgacttgccaactgtcacgttcaatcgcttggggccaagtggactgcttccgtatgtctatcatcccaagcatgggtttgcctacaaccagcaagtaacagaaaacgggttttgggttaaaagtgtcccttaccagaaaagttgtctgaagttcgttcgcaagctggttaaagaaaagatcaacgagttccaaaaagcgtttctccacttgtttaccggctcagagaagagtgtgttggtgaatgccgtgaatcaagatcgtgcagaagagttattcctcggtttggttgactatgtaaaagataacctcgataaagcggcatcaattcatgtcaacctctacgatgatgagctggttttcaatgcatttgaccagtttgcagaaacgttcaattacgaagaattaaagtcttggttggaattggaccgagagaaagtgcgagaaaatgccgacaccattatcgatattctgcgaacccggctaacttacagcaagtttaccaatgctcaaagtgaacgcgaagggcaagcctactcgcacctgtcttttttcagaaacaacgacaacgtgaagttaacgaccttgagcgttgacgacatgcctagtggtattgcgtgtgatggtctgctgacgggcgacgcttctaaaagtgatgaaggctcatacttcactgcatttggtttgcaaaacgttcaatatagtaaccaaccacacttggaaatagcgaagtatgttggctcgttaatagaaccagcatttaagcccagcacacaatacacgggggccaatgctcctgctcttgcggtcagtgaagactttaaatctctgctagcgcgctcttatgacagctcgatttggaccaccatcatcgacccgaaagtgacgctagacttcttccacgccaatcaatgtatcgtgcttattcattattctgatcagtacaccagctcagccagctacgatgcgataaccgtgacggcacagcgtggtttgttcgaaagggtggttgcacaaagtggcggcaagcagattaacgagttcaatgccttcaatggtgattggctactgaagatgttgacttgcaacgacaccattcgcaaagagcgaactggcattatcggcgcctataaatttgcgacgtgtctggtgcaccaatctgatatcacctgggttccgctctcagttggtgaaatgatccgcgtgtcgggtaacatcggcctgaaaatgaccgacagtgacttctcacgcaatgtgcagagatataaaaaaggcgcgatttcagatgatatactgctggtgggctttaaggagggtaacctttatttgcttcctgtcgaagtgaaaacaggctccacgccagactacaaaaaagcagtacagcaagcgaatgagcttcgccgctatctaacagagcttttgagcgacgagacactggcgtcgaagctataccgaggcttgtttatccgccaagtgttgatgcaaatcgacaaataccgtctgtacaacgtattcagcaatgactatttcgaagcactgctggcagagaaagaagagtggctacgcggtaactacgcgattgcggagcttgagaactatccagcaggtctagtggttagccaccttgaaagcggaagctgtttcgaacctggctataacatgcaggatggcgtgttgaaggttgaccttcctatgtctttgctgccttcactggtgcaacacccgcttcaagtattaatgaacgaaaaggacatcgcacagatctgccatgtgccggcggagtatatgttggtggggcagacagctttgaaaaaaagagagtcgctcgttccattagacgttgtggtcgataagccagaggatttaaaaccgaacctccaaacagaggagccgtcaaagttagctgcagagccaaccccagattatgcgagtgaatgccgagttgaaattggtcagaatacgcttaccggcgaaaaagttttctgggagtacgggcacaaggatttagcaaaccgtcacctgatcatttttggtagctcagggcagggtaagacctactgtatacaaggtttgttgatgagcttggccgatgctcaaattcggtcgctggtgattgattatacaaacggattcttgccgaatcaccttgagccggagtttattgaacgaacaaatcctaaatccaatattctttgtaatgagccatttggtatgtcgccatttagagctcaaaagcaagattttggcgggatttttctcgaagagaagcctcatatggtggctggaagggtagcctctgtttttaacaaggtatattcgacaattggcgagcgccagatcgcagtgctcaatgaagtgattgaatctggtgtccaacgatatggtagtgcttatagcttacagaatatgttggatgacctaaacgaggaagaaacagcaggaccagcacttgcaagcaagctggctcctcttgttaagtctaacttgttttcatctgacagtgataaaagttggaatgatgtgtttgagagtgaacatcaccgctcaacaattatgcaacttgcgtcgcttaaccacgatatttcaatgctttgtactgagtttttactttgggatctatactcctacgcatgtagttacggtagtaaggaaaaaccgattcctattgtattggatgaagtgcagaacctcgatcatcgcctggagagcccattgggcaaaatgttaacggaaggacgcaagtttggggtatccctaattctggcgactcaaacgctaagtatgctgcgtaaagatgagcaagatcgtttattccaggcgtgtcacaagctgatttttgcaccagcaaaaacagagacaaagacgtacgcgaaaattcttgaactgagcatgccaggtacaaagcaggctgagtgggaaaagcaactaggagacctatccaaaggacagtgtttatcagttggctaccatttggataatggtcagttgaagatgagtgttaagaaagtgaaggtttcctccatgttatcccgcctgaacaattctaagggttgagcctggtaggtctatggatcttagctttctgaaaaatttagttaatttcgtgctggcggcgaggggactaaagggcccctcataatcctttgatgttgttatatgcactggtaatcccccctgcattcaggttaggagaaaattctacttatgcctgcatcgatttttcggggggattaccatatgtcagatcaagtcgcgactaatacagattaccgttgttagtgtgccattttcatgctttgttagcaaagatggggtgaatatcgacttattattttccattatttgtatactccatatacaaaatcttttaccgagcgatagtttcttaaccccgcaatcccatcctcaacatgtgctgcccaggctttaatcatatccttctgcgtcatctgtggataaagcatcttcaacaccaattctgtagtctgtaatgtctcccccagccacgtaattttatccagtaccagcgagccatccagcttcttggtatcccgctcaggcgaataacggaactcgctctctaccgaacggaaaaatgccagtctagccgcgacattcggcgtaatccctgtatatccttttaacttcttgagctggtcttcagtctgacgactaagtaccattctattcgggagcatcagactgcctccttagttaattcccagaaataaccgggtttcagcgcagatgatttggtatgtgcattaaacacaatctcataagcatgagaaatatcatcacgcaatctatcgacgaaataacgctcgtctacttcagtatcggtggatagcagcacaacttggtggctggcctccgggaaataatgattaatcaacttatcccgatgctgagaatccagacgtcctaacggcgtatcaataattaccgggaaatcacgcccagaggtttttgccagcgcctcaagaatagcgatcgcataaatctgcttttcgcccgcagaaagcagcttacgattaattaccgaacccttttcatccaccagttcaacatcaaatgtctgtggatttatgtgcgcattaagctgtaaatcttctttacgagccagcttgtggtaggcaatttcaaagttagcagataactttttcactcgcgcctgtgttaacacatcgctgtagtaatcgagcaggttaatggtttcctgtgcatttttaaacgcactgctaagaccatgttggctacgggtgatgtcatgtgctttctgtacctgacgaacacagtccagttgctgctgtttcgtccgtttagcctcttccagcaacgagcgatatttttgccgctgtttttcacgcttatgatcgagatcgcgtaatgctgcaaagagatccattaactgctcgtcttctggggcgcgagcaatgttagcagcggcctgctccagttgttgttcaatatccgctaattgatggcgatacatatcaaaacgttgccaagcttttttgctgtcctgctcaattgattgctggagcataccggcttcacgttcagaaatatcaaacagcaaatcaccttttggtttggctgccatatatgcgtccaaattattagtaatcgcttcggtcgcaatggctttggtgctgctctcactgctggaacggaacgcgatatcttttttgagttgagttaaaaattgatttaactccgtctcaaaatttttcgcctgcttaatctgtgcttcattggcaattttttccagcaaccgcgacaacgtattaggcgctaacgcatagggcaacgatccatcgcattcctgtcgtaacgctttttccagacgctctttttcttttaacagcgtttcaactttctgtttttcctgtgctttggtctgggcaaatgcgccgccctgcgcatttaacaatccctcatggcgaataatgtcttgggataaaaattcaatccgcgagttgacgaaatcggcctcttccagcaatttctctgcctgaccggcaagcgttttaatctttgtctcaagcgcttcgacctgctgttgctgggagccacctaactgcgctgtttgctggcgtttgacaaaaatcatcaggtcattttgcagtctggcgatcagatccagtcccaacaaacgacgcaccgctgtacgcagaatattgccggattcatcttccgccaactctgcaatcttctctccatcaaaaaagaatagatcggcgacaccgtgaggaattaattcattcaaaaacccctggcactgatcataactgagttcactacgcggttgtccgtcctgctgcaaagagagacgatctttctttcctttcttccagctacgcgtgacggtgaattcagtctcatggccgttttggttgtaggtaaaggtcagttctactgcggcctcatccggacgctctgctgtatacgtcccgttgtgcaccagcgctccgagttgttcaacatattcctgctgctgcattgccgagccaaacgctaaacgcccatacagtgccagtcgaattgccgacaaaatagatgttttccctgcaccatttaaaccaccaaatagaataatcgggcgagggtttacttcatgcggacgctttctgggagccagatctatggtgtgtgtgccgcaaaatacgcgaaaattatgtaatactagttgcttaatgagcacgttcattctcctcatcgataagcacagacgattcgcccgcatcgataattctgcgctgtaaagtctgaagttcagcttccagcttttcaacttcgtcctgatgaaaatcccgatcgttgcgtttttgcagcgttgcttgttgttgctggatctctgccagactgccccaatcctgcttcaaaattgtgccgagcttgtcaaaaatcccctgacgacggcttaacccttccatcgaggtttccagctcaatcagtttcattaccatttcaggtactacgtcgaacccttgcgttatctgggccaacaaatcagcatcgctggcatcaaagcgcgattgatcgtcaaccacccagttcagatcctgctgatatacctcgcgataaatacccggcaacgtgtcgtgccagtctggctcattaggatcttttaaccactcctggcggatagcgtgtagctctggctgggtaattaacgtaatcgtgtggccttgggcgtttaaatcacgctcaatttccagtaagtcttttaaccactgctggcggtatttgagccagtaggggccaggaacatgcttgcgctctgcactgcgatcttcaccatctttagcgtactgatagctcaccttaccggtgcggcgtttatagttgcgataggtatctttattcacaggatcggtggtaaacgccagcagatcacgatatttcagcaatggcgacatccactcttcgccatttttgatcagactttccatcgctttatctttggttactacggtacaggtccagcagccaaagcgagagtttccacaagaaggggtactttcgtcgatcaccaggggacactcaccctgtgcggaagagtccatatacagcgtccacagaggacggttatttccaccccacgggctttcccattcgtcgatatcttcaggagcatagcggaacgcgccgcgcagcagtttccagacgtcttcaacatcccaggtatcaataggggtatagataaacgcatttgccagcgtggtatgccgggccaggcgcgagccatcaattttgtgctttgcgatgacttgcgcacgggaggcactctcgctactacgtgagccgaggacaactatcacttcatcaaactggctgaccttatctttgataaagtcacttaccgggttgattttcatgcgttctgtacaccagcggannnnnnnnnnnnnnnnnnnnnnnnnnnnnnnnnnnnnnnnnnnnnnnnnnnnnnnnnnnnnnnnnnnnnnnnnnnnnnnnnnnnnnnnnnnnnnnnnnnnnnnnnnnnnnnnnnnnnnnnnnnnnnnnnnnnnnnnnnnnnnnnnnnnnnnnnnnnnnnnnnnnnnnnnnnnnnnnnnnnnnnnnnnnnnnnnnnnnnnnnnnnnnnnnnnnnnnnnnnnnnnnnnnnnnnnnnnnnnnnnnnnnnnnnnnnnnnnnnnnnnnnnnnnnnnnnnnnnnnnnnnngaatgtctcggtttgggttttttggggtttacagcatgttgtgtgatcggtaagccgtcgcgcttagcgccagcttcaatctggagcatcgtttttttgatgagatctactacaaccggcgtctctacgagcgtgtcagaggaaacgacaaacacatccttcgtacgcatctccggcggaaggcccatcaacgccagataaacaagagtaataactgctgacgagtctttacctccactgtagccaatcacccaagggcgtttatccgcgcaataaacgcgctgaacttccgagacaaaatcagcgagagtacgtccagcaaattgctcttcgtttatgaaatcttcatagtcggccagatcataggcctgagttaatgtactcatgatacaaccatctgagcttcaagctcttgttcttcaggagaaagggggagagacagcgcaatttttaaagcgttgcacgttagctgaatggcggtgccggttttgctcaatttgccatgctgcattgcgcgcttaatcatctcaggattgcttttacgccagtcaaaggattttagcttcgtaagtttttcctgccagtgctcaggttcttcagccagtagtgaacggcccagaaggcccaaagcttgcaaaccgataccgtgggcatgcacataatcctggcggagctgcgctggagatacttcttttcgcgcagcaagctgccagtctggcatgactttgaaaatagcctgccagtatagcgtagcgatatgcgtgttgtcctcaatactgcctactttagggtctttaccaagcagggcacgggttgcctgtttaatgctgcttagtgtgaacagtttattggaaagcaaactgatactggatttctcaagttcagtaagaccaataaagggctcgatagacatggccagatagcgtgcaaggtttgagcttacgtcgcgatgatcgtaaagtgcggataatgatgggctgggacggatggcgtatttattcaggtctgcaaacatctgctgactacgccttaagccttcatcaacaaagaacaatacagggatgttgtcttgtcctaattcaggacgctcagaaagggcatcctcgatagccttacggcgatgttgaccatcattgataagaatttgagcatccattggtacgcgaagcgttccaagattgttggagttttcgaactcatcaaactgtacatcgacagcaatggatgccgtcaatgcagagaaaacgtaatctttcgggttttcaagtaaataacgaaccatttcgggaatgcgcgatttgttcagaatacgctgagcacgcagctcaggtggaacgtctgactcatcaaagctgaagatcttagggatgatgcgcatagggcaagtggcaatgtagaatggccgtcctgcctggatgcctctcacagcggggaaagagtagcaataatctgcatcaaagttagccatgttctagtccctgttttaaagacgcaattacgttacattttacgtaaaaaatttcttataacgaaatttttatgatgataaaacacgaattgttaaagatttacgtatgatttaacgtaactctttgctgcgcttgattcttcttgaatgtaaacctcgagccaaagatttggagtaacgacttggccgtatgagctctagatcgataccaattactccggcatgcaagaagtttacgtgttgccacggtctcccaaaaagcgttgatcgttgtgtaggaactgacaccgaaggtggcgagcgaaagctcgttcctttttgagagccgctaaaacgcatgctttttacctaaccattcttcctgtctccttgtgagaagttgactgaacgagacactacgttattcgtagcttctttggaatctataaagctacgttttacgtagttttgcgagagtgctcgagaatttttgaaaatcttacataaaaatcaatctagcggttgcactacgtaaaacgtagtatcttccttgggcattaactacgattatcgtagttatgaaaacatccaatccccacaatcagctcttcagtcgacgcctcaaagaggtgcgcttagacatggcgttatcgcaaaaaagcttgggtattttggctggcatagatgagtttgcagcgagcgcacgtatcaaccgctacgagaaaggggttcaccaggcaagcattgaagtcgtccggcatctcgctaaagttctcgaagtgcctgtagcatacttctacacagaagatgatgaactggcctctttagtccgtctttggccgaaactggactcggaaaagaaaaaaaacatccttcagcatctctaaacaaaaaagagtgcttcgctgtactttctcttctcgaaaggctttccagtgatttaggaccaaaaccttgcattagaatcttgcttcagttcgtctgatttcatttcctgaatccccctcgcaaattccagatttaccctgcacaaaaccgctgtatttatattcagctctgtataatgaaccccagaaattacgccgaacggcaaaggaagtatcgaagattatttaaagaagaattcgcgatatgaaggtgctgcaacacccccataccgctaaccaccaacaactaaacaggagttgaaaatggctgcgacgaattttaagccagagtttactgtttgcaaaacagaatcagatgctttcaccggcatgattgaaaaccgcgagctggtacgcaaaaacagcgcccgccgtcttcacggcaaccagaccaacgcggcgcccgtccatccccgcgcggaaacgccgcaggacagtgccgcctgctgcgaactgtatgcatagacatgaaataccttcttctgggcggcgagtggttaacccgtgcgggctttatcgacggcatgcccgtaaaaatccgcgccatgaaagactgcattgtgattacgccgcagcatacaagagaattatggggatgcctggaagggatgagcgtggtgaatatcaataaacagaaagtcgcgcaatggttgaagacgtttccgggagcgctgaatgatacaggcgatataccggctgttaagcgtggaacagggcaggcgatttcggagtaaccgtgcttcccacctcatgtaatacttgaagcaataaaacgatacgggcatattatcccatgcccgtaatcttcagaaatcactcgtgctttacctgctctttcacagccttaaccagcacagcgtgaagttcgccaacggttaaatcgcgtatcacaggttcgggtatgccacgcacccagtgcataaacctacagatgccataaaaatctataccctcacccgtaaacagatactcgttctcagcaagagcgaacgttttcatatagccatcttcttctgtggcaagctgaacgccaaaagcttcttcgcagtcttccagtaggtcttcgccatccataccgcaaatatgcaaatcggcctcaatccaggtgttgctatcaataggtttacgatgtatcccagatgactcacgtacgacctcaataacttgtgcgagagtaggtttcatttatagaatattccatattcgttgacttcattaggctatctggcacttaacagttacccgctgtcgttaatagatgaagttgagcactggtcaagaaagcatgattatctgtgttaacccataaaaactatggtttgaaaccgggtttaccatttgccctacgccattccttaacttctctaacaatgccttctggactataatctttgccctcttcaggataaaaaatcaggtcagagcctgcggggtgctgggtaagccgtttaaattctctaaccaatcgattctcgtcttcttcagttggtgcgtccgcattgcaaattttgcgtaccagttctaaaaattcttcttctgtgtaatcgcttaacagtctcatatcattctcccttatgaattttgatgtgatgttttggagtggttattcccatattatcaacgtcatacaccttaccgccctgactgataggttgtatgtgatgaatttcatagcgttctctttttccaaccgagtcaggtgtacgtgtataaggggcgtttcctttacgcatacttgcgcggttattgctgataaattgctccagcagtaccggatccctcgacacctccagccaaaacgccttacgaaactggtcaaagtccgtaaatgtctgcccacgtaatcgatccgctatctggcttggaataggagaaccattccccgtattcgcatcagataaccaaatgccgctaattttctgtcccttgcctgtgacctgtccgggattgtggcggatatagacataaatcggcggcaccccgcccaccggcagaatcagaatataatccgcaaacgtcttctcttccggtgtcgggctggtcgtcgcaccaatccccgtatcctccggcagcggatcaaccacaaccgggttcggtatccgtaccgggttgtgattgcccgtatcccacggcttactctctccggtgcggtccggtgtccagatgagggtgatgcaggggtcttcttcggtggtaaaggtatacgcctgacgtcggctatcccactccatcctgcgaacgcgcacgctgtccttgccgggcggcgtatgccagcctcgcggtgtcgggttgccgctggcgtcgttctcccaggtgaagcgaacgcgggtaggggcttcccgcatctgctcggcgcgcatcctgtcgataaaatcctgctcgccgtcgttcagcttgccgggatacatccctataagcagccctgcgacaggtgcaccaaggcctcccgtggctatctcgccaagtgcagcaccgcgcacggcccacgtgccggaagtgatggtacgcccgccaaccagtacgagttcgctggcatcggctatcgcgttccgcgcggtcctggccctttcttcggccgcaatggcagcctggtagtccatctcctcgtgatgcccgttccaccaaagataaagcgcgctgcggtgcttcggctttgggatcgccttacgctttgccgcctgggcgtgttgcggggcgtcgttaggcatggcctggtaaaatgccatctcggcgaagttggtgtgcggctctcttccggtacccgcatcgttacagccttcaccgcgcaggcaggatttcgcaaagacccggttgcgatcgcgttcttctgcttgtcgctgcgcttcggcctcttgctcttttcggcgtgctgcgagcatggcctgatgcttttcctgtgcgatctgttcaggagaggggccggagccgagccactctcccgatggggcgatcacgcggttggttccgtgcgggcagccacaaatgacgacagaaccatcgacggctgaggtttgtcccatccagttaacgcgaggttcgccgtctgcaacaaagccctgcttgccgcatttagggcatgccgtagttctatcgccaacgcggataacgccgcgaccgtgctcggtgcagttgggcagggtgctacagcatattgcgccggtagtcgttctgtcgccgtgcagcgcctgaccgcggccgtagttcgtggatcggtagcccatggcctattctccgggccaggttaagaaatcctcttgaggtggaataccttcgcgggtgaccagataagtactgccgagcggtgtgctgataatttcatcatcgttatcaagcaggctgcctaccagggcaacgccgtgtcctttccacgtaaacgcggttcctgatgaggtcataatcgtggcgagcgttccatccggataggccacacagtctccttcgacaatcgggctggtgtaactcccatcgtccatgagcattgtggcttcacgatcgacgggaagtaccatgccgcccattcgggtctggctgccagccgtggcaatccgccagatggcggtgacgggatgttgtcgatgaaaggcttcctgttcggcaataatggcgcgcgcgtcctcaggcatggcggccagttcttcatcggaaaaaggcgaacgatctatttccgcttttaactcagcggtgaattcattggtataaagctgcatgacaattccttgtaggggcagaagagtaaatgcagcaatgctaggttttagactgtatggcgaatatacataaagtggttaataagtcgggataaaatccgaaataaatatccatattgatattggtcatcttttaaagaagggatagtaatggttcctgttaattataaatgtaatattcgctgaattgccgataaataatattatgcagcgcatgtaatatttgaatacatacgctgcatgacgttattttaaaacaccggcacccccagcccaaccttcacctccctcaacgtctcctgcgtcaccccctgcgcccgttccgttccgcgcttcagcatcgccatcagctcccctttatcctgcatgtacatcgccctccgctcccgcatcggcgcaatcagctcctgcaaacacgcctccagctcgttcttacacaccctgtcgcccagcccgcccgcctgataatgcgccttcatcgccgccactttctccttgtccggatgaaacgcgtcgaggtacgtaaacaccacgttcccctcaatctgccccgggtcgctcaccttcaggtggtgcgggtcggtgtacatggcgctgaccgcacgatgaatcgtctcttcgctggccgaaaggtgcagcgtgttgcccagcgatttcgacatcttggcaccgccgtcgatgccgggcaggcggctggtgtcgctcagcatcgccttgcagtggcgcagcaccggggcgggcagcaggctgttcatcttgtgcacaatctcgttggtctgctcaatcatcggcagctggtcgtcgccgacgggcacgcactcggccttgaacgcggtgatgtccgccgcctggctgatggggtaggccataaacccgaccggcagcgagcgggcgaaacccttctgcgcaatctcgtttttcaccgtcgggttacgctccacgcgggcgacggtgacgatgttcatatacagcatcgtcagctcggcaagggcgggcagggcggattgcaggcagatcgtggtcaggttcgggtcgatgcccgcggcgaggtagtcggccagcacttcggggatgttgtcgcgaattttttgcgggttgctgccgttgtcggtcagcccctgaaggtcagcaatcagcacaaactggttgtgcgtgtgctgaagcgccacgcgctggcgtagcgatccgacgaagtggccaaggtgcagcgggccggttgggcgatcgccggtgaggatggtgggtgcgttcataaagactccttaatgtgcagtggccgaaaggggtcttagaaatgtgaaagccgcctttcggcggctatctgaaaatgaggaaaactactccgtgccgcctttaagaaggcagccaccagcggtttacggtgagcacggcgtggtttatgttcatctctttaccgtaccatgtccggcgcgaaaaacaaaagggcacgtcatgctgcaatcactcaaccacctgaccctcgcggtcagcgacctgcaaaaaagcgtcaccttctggcacgagctgctggggcttgcgctgcacgcccgctggaataccggggcctatctcacctgcggcgatctgtgggtctgcctgtcgtacgacgaggcgcgccagtacgtgccgccgcaggagagcgactacacccactacgcgtttaccgtggcggaagaagattttgaaccgttctcgcaaaggctcaagcaggcgggcgtcaccgtctggaagcagaacaaaagcgagggggcatcgttctattttctcgacccggacgggcacaagctggagctgcacgtcggcagcctcgccgcgcggctggcggcgtgtcgcgagaagccctacgcgggcatggtgtttacctcagacgaggcttgaggcgcgcaccttcagcctgcccgccagcgtcacgtgcgtggcggcatcttcctgattgcacaggtactccaccgccagccgtcccagctcgctgtagggcagctggatgctggtcagcggcggggtgagctgctcggaaatcttctggtcgtcgtagcccgccagcagcatatcctgcggaatgcgcacgccgttcaccgccagcgcctggtagcagccgatcgccagccagtcgctggcgcagaagatggcgtccgggcgctcggtcagttccagcagcgaagctgtcgcggtaaaggactcgctgaactgccagttggtctggcgcaccaggccgtcgtcgcacgccagtccggcctgctgtaatgccgcctggtagcccgccagacgctggcgcgaggcctccatccagctctcgccggtgatgtgggcgatgcgcgtggcgccgcaggcgatgaggtgtctggtaacctggaaagcgttggcgtagtcgtccggaataaacgacggcagcagcggcgagccggggtcgcgctggttgagcagcaccagcgggatgcgggtgcagtcctggaatgccgtcatatcgacgacgttcgtgaccggagaggcaaggataatcccgatgcagttgcgcttgtccagctggcggatgatgttcagggccagctccacgtcgtcgccgtagtcatagacggtgagcagggtctcgttgcgccacgccgcttcccgcgcctggctgatggcgtcgataaacgggtcgaagctctgcatggagctgaccagcagggcgatctcctcctggttgcgcggagcgtgaacggcggggaggcggtcgtagccgagctcggtggcgacgccaatcacccgctggcgggtgtcgtcgctgagcttgatgttgcgggactggttgagcaccagcgataccgtcgcctgcgacacccccgccgcccgcgcaatatcgttcatcgtcacttttgtttttcgcttcatccgtcctctccctttcgcgaatttgcatcataccctaaccgcgcgcttccgcgccgtcgatcacgtttctcatccatcgaagcgtgaactttgtgagaggcgtcgcttttctgagcgccacgatttgcgcatttattctgcaactaatatttattagctaaatattatcagtaagaggatgcgtaatgaaagagcaatggagcagggagcaggcacaggcgtggtatcagcagaaaggctggctgtgcgggtttaactatctgccgtcgacggcggtgaactggaccgatatctggcaggaagagaccttcgatgccgaaaccatcgaccgcgagctgggctgggcggcggaggcgggctataacaccctgcgcatcaacctgccgtttatcgtctgggagcacgaccgcgacgggctgatggcgcgcatcgaccgctttttgacgattgccgacggtcacgggttcagcaccatgctgaccctgatggacgactgcgggttctccggcgacgagccgtacctcggcccgcaaaagccgcccgtaccgggcaagcacaacagccaggcggcagcgagcccgggacgcgataaggtgtgcgatcgcgactgctggccacagattgagcgctatatccgcgacgttgtgcgccagttccgcgaggataagcgcgtattgctctgggatctgtataacgagccgggcaaccgcggcattttcgcgaccggcacggaggaggtgttgtacgacgagaagctggaaacctgcgcgcacgagttgatgaagcaggcgttccgctgggtgcgtgaggaagacccgacccagccgctcaccatctgcgcgtggcgtctgccggcggaagaagagggcgagacgttttaccagcacccgctggaccagaccgcgctggcgctgtcagatgtggtgagctaccacgcctataccaataccgggcgcatgacggcgattatccagcagcttcaggcgctgggccgcccaatcttctgcaccgaatggctggcgcgtcacgtgggcggcaccatcgaagagcagctcccgctgatgtacatggcgaaggtcgcgccgtatcagtgggggctggtgcgcggtaaaacccagacctggctgccgtggccggtagtgatgaaggagtccacggactactgccgcctgtggttccacgacgtgtttgaggagaacggtatcccgttctcacgagctgaaatcgcgctgatgaagaagctgcgcaaaatcgccccgaatccgcagggctgataataatgacccggcgcgctgtcgccgggcaaccaggtacgcactatggcaatgacaatgaaaataccgtctcgcgagttgtggtcttactttggctatggtttaggtcagtgttttagctttggtttagtgggttcgtttattaactatttttacaccgacgtgctggggatctcggcgctggcggcaagcaccatcttcctgattgcccgcgcgtgggacgcggttcacgatccgctgtttgccagcattatggacaccattaacagccggttcggcaagtttcgccactttttactgatcgccccgctgctgatcaccggggtcaccctgttggcgttctataaaatcgaagcggacatgaccaccaaaatcctctacgccggggtgacgtatatcctgtgggggacgctgtacgccatctccgatatcccgttctggtcgatgtcatcggtgatgaccaacgactccggccagcgcacccgcgcggtgacggcggcgatgcttggagtgaacgccgggatcgcctgcgccaacatcttcttcccgaagctggcggcgttctttgcccagtacagcaacgataaaggctactttatggcggcgctggtgatgattctggtgggcctgccgctgatgctcaacggctttatgcagatcaaagagcgcgtgccgccgagcccggaaaaggtgacgatgcgcgacaccttccacaacctgcgccagaacaagccgctgtttatcgtcctgctgtcgttttttttctgcgtgttccataacgtggcgggcggtctctatatctacttctttatcaacaatatgggcgacggcagcctgcaaatggcaattggcgtgatggggatagtggcggcggtgctgtgcctggtcgccccgctgctgacgcgccggatgcagaagcggaagctgtttatgatcctctgcgggctggacgtggcggtgcgcgtggtgatgtggttcacgggctatcagcacacggcgttgctgtttatcctgctcggcctgagcacgctgttcgtgatgatgaccaacatcctcacctcgtcgatgattgccgacaccatcgagtatgcggagtatcacacccacaagcgctgcgcggcgatcaccttctccgggcagacctttaccggcaagatgtcggtggcggtgggcggcgggctcatcggcgtgtttctgacgatgatcgactatgtgccgcaggcgcagtcacagagcgacagcgtgctggcggggctgttcttcggcatttgtttgttaccggcgataggctcgctgatccgaatgggctttatgtcgcgctttaactttaccgaggagaagcatgcggagatttgtcggctgctggcggagcggaatgcgtctgcgaaagcgccgggtggcggctgcgccttacccggcctacaggaccagcccttgtaggcctgataagcgaagcgccatcaggcttcgcgtaatgacttacagcgacttcacaaacgccagcagatcttcgttgagctggtcctggtgggtcagcgcgaagccgtgcggcgcgttgtcgtacactttcagcgtggcgtttttgatcatctctgccgccagcttgccggtcgtttcaaacggcacgatctggtcgttgctgccgtggatcaccagcgtcggcacgtcgattttcgccatatccgggcggaagtcggtttcggcgaaggcggttacgcagtcgatggtgcccttcagggacgccagcagggcgatgttcagcgtctgcgtcagggcaccggcagaaacggtctgcccggcgttggtgccgtagaatggggtggcgaaatcgctgatgaactgagcgcgatctttacgcagtccgtcgcgaatcccgctgaacacgctctgatcgaccccttccgggtagctttcggatttgccgaaaatgggcgttaccgcgcccagcagggcaagaccggccacgcgttcgctgccgtagttgttgatgtagcgcgtcacgtcgccgccgcccatggagaagcccaccagcgtcacgtcgcgcagatccagcgtggtgatcaggtcgttaatgtcggacgcaaaggtatcgtagtcatagccgttccacggctgatccgaacgcccaaacccgcgacggtcaaaggcgatggtgcggtagccgcgctcggccaggaagttcagctggctgtcccacatgtccccgtccagcggccagccgtggctgaaaagaaccggtttgcccgcgccgcagtctttgtaataaatctgcgtaccatcttttgccttaaacgttgccatagtgtgttcctctacaggtgattgttatgttcagaccggcgcgaccagataacgaattgccggtgatgttgtgccctgatgaaaagccagaacgcggctctgcaacaggaggtcattcatggtgtggcgctcctgctggcgcagatgctcgatccaggaacccatcaggaaggtttcgataaacagacccggacgttcaatatcttcgtacaccgcccagctcatcgccccggcgcggcggcgcacccggcgtagctcgtgcacggcctgcaaaaacgctttcgcgttctgcgggtcgatgatgtactcatgcgagaccagcaccgggccacgctcgttcgggagttcaatctccaccccgtccagcggctgcccgctcaggtcgagatttaaatccggatctttctccagcttccagcggaacaccgtcatgctcgccagcaccatccccagcgtggcgacaaccagcgaagccggagtgccgaactgcgaggcgatctggccccagacggcgctgcctgcggtcatcgaaccgaaaaagaccgtcagatacaccgccagcgcccgggcttttacccagcgtgcggcgctgcgctgcgcgccaaggttgagggtggagagcaccgcaatccacgcgaagccggtaaagaactcaaacaagtttagcagccaaaagtgacgtacaaatgccagcgccagcatggtgatcgcaaacgtcaggctggcggccaccatcagccgatcggcgttcagccgctggcgcagacgcggcagcaggatggccccggcaatggcgccaaggccgatacacgccagcatcacgccgtagcccgccgggcctaagcccagctcgcggcgcgccaccagcggcagcaatgcccagcccgcgctgccgaaaacaaaaaaggccacggtgcgcaccagcacgttgcgcagcaccggcgcggcgtgcacgtaacgaatcccggagcgcaccgcagagaagaagtgctccggtggcaaacgctgcacggacggtgccggacgccagcgccacagcacccacgccacgcccatcacggacagcgcgttcagggcaaacaccatccacggcccggcaagcgacagcagaaaaccgcccagcgcagggccaattgcccggctgatattgaccccgagcgagttaagcgccacggcggaacccagctcgggcttgctcaccaggtcagggacaatcgcctgaaacggcggcgaactcatggccgcacccacgctcagcagaaacgtcgccaccagcagaacggtgggggtgacgtgtccggtaaaagagagcagcgtcagcccggcggcggcaatgaacacccacagctgggagaagagcaggtatttacgtcgctcaacgatgtccgccatcaccccggacggcagggcgaaaaggaacatcggcaggctgctcgccgcctgcaccagcgcgatatccagcggatcggcgctgagcgtcagcatgctccagttgataccgacgtcgctcatccatgagccgacgttagagaccaccgtggcgatccacagcatgcggaacaccggctggctcagcggctgccagggtgaaaccgcgggggcgggcgtcgtctcgacgtgtgcgtcgcgaacgtcgtttacctgggtcatgcgaacctctccgttgttttacgctgcactcgccactggcccggcccggtaagggcgagggtggtgaagataatcagcagcagccagccaaactgcccctcggcaatcgaccagttcgggtggaccgccagcatcgccaccagcagcacggcgataatcggcaggcacgccaggcgggtgtaaatccccgcaatgataaacagcgggcagatcacctcggcgacgatcgccgggatcagactggcatacggcccaaaatcaaacggatcttcgatgcgcgtcagctcttcgctgaagtgcagcaccttcggcaggccgtgcacgtaaagcagcagcaggctgccggtcaggcgcagaaagaacagccccggatcgatccggggcgaagcgtcattttgtttcatcagaatgcaaagcagctgcaacccagcgccccccagaaagcgttatcgtcggataccggcatctctgacgtgcgggcaaagtcatgctggtggttgtgaaccccgcacgggccgctacagtggtgagtcacactcatacccacgcgtgcggcctgcggcggcgcgctgcggtagtggcccggcaccttcaccaccggggaccactcgggcaggaccggaatggcgggcggcgcgagtgggccaaaagcgcctgcggcatagacgatatcgccgttcaccacggtgaggacggactcgatgcccttgatctcctcctccggcacgcggaagtaatctttgctgagcaccgccagatccgcgagctggcccgctttgatctgccccttctggttctgctcgctggagaaccacgcgctgccctgggtccagagcatcagggcggtatcgcgatccagacgggcgctgtgatcgtacatctgcatcccgccaacggtgcgcccggagaccagccagtagagcgcggtccatgggttatagctcgccacgcgggtggcgtccgttcccaggcccaccggcacgccggtctcgagcattttcgccaccggcggcgtgtggcgggtggcttcgatgccgtagcgctcggcaaagtactcgccctggaaggccatgcggtgctggacggcaatgccgccgccgagtgctttgatgcggtcaatgttggcctgcgacacggtttcggcgtggtcgaagaaccagtgcagcccgttgaacggaatgtcacggttcaccttctcgaacacgtccagcatgcggctgatggattcgttgtaagtggcgtgcaggcggaacggccagcggtgctccaccagatggcgcactacgcgctccagctcgtcctccatgcccggtgcgagatccgggcgcggctcgaggaagtcttcaaaatcggcggcggagaagaccagcatctcgcccgcgccgttgtggcggaagaaatcgctgccctggcccggcgtcagcatgtcggtccatttttcaaagtcttccagctcgtggcccggacgctgggtaaacaggttgtaggcgatgcggatggtcatctgctttttctcgtgcagctcggcaatcacctcgtaatcttccgggtagttctggaagccgccgcccgcgtcgatggcgctggtcagccccagacggttcagctcgcgcatgaactggcgcgtggagttgacctgctgctccagcggcagcttcggccctttcgccagcgtggcgtacaaaatcatggcgttcggacgggcaataagcattccggtcgggttgccgttggcgtcgcgctggatctccccgcccggcgggttcggcgtgtctttggtgtagccgaccaccttcagcgcggcgcggttgagcagggcgcggtcgtacaggtggaggataaacaccggggtgtcaggcgcggcgtcgttaatttcgtcgagggtcggcatgcggcgctcggcgaactggaactcgctccagccgcccaccacgcgcacccactggggcgacggcgtgcgcagggcctgcccttttagcatccgcagggcgtcggccagggacggcacgccttcccagcgcagctcgaggttgtagttcaggccgccgcggatcaggtgcaggtgcgagtcgttcaggccggggatggcggtgtggccttttaagtcgaccaccttagtgccgtcgcagtggtgttgcatcacctcggcgacggtacccacttccagaaattttccgtcgcgcacggcaacggcttccgcgacaggattctcgcgatcgacggtgtgaaactggccgttaaccagaatgagatcggctttaccgagggtaaccataatagctccagactaagaggggaatggtcaggattatgggaaccggtttcggcaaagatccagttatacaataggataggtataccaaagtataactatacctaaggttaactatacgaagagataattacaccacagcgctgtgggtcataggatgaacgcgattttatcggcgtgctgttcgcggcgattttaacctttaacctcactggataatcttatgaccacttctaagctcgaagtcttaacccctgccaactgtcagatcatcttcatcgatcaccagccacagatggcgttcggcgtgcagtctattgaccgccaggtgctgaaaaacaacaccgtggcgctggcgaaagcggctaaggtgttcaacatcccaaccatcatcaccaccgttgagaccgaaagcttctccggcaatacctatccggagctgctggacgtgttcccgggccaggacattctggagcgtacctccatgaactcctgggacgaccagaaggtgcgcgacgcgctgaagaccaacggcaagaagaaggtggttgtcgcgggcctgtggaccgaagtgtgcaataacagctttgccctgtgcgcgatgctggaaggcgactacgaaatttatatggtggcagacgcctccggcggcacctccaaagaagcccacgacttcgcgatgcagcgcatgatccaggcgggcgtgatcccggtgacctggcagcaggtgatgctggagtggcagcgtgactgggcgcgcaaagagacctacaccgcggtgatggatatcgtgcgcgagcactccggcgcctacggaatgggtgtggattacgcctacaccatggtgcacaaagcgccgtctcgtcagaagagcgagcaccgcaccttagcgccggttccggcacgctaagtcccgctggcgggctggtccctcatccggctcgccgctgcctttttctctggagttcacaatgagtacagggttgatatccctcgcggcaggcgtgttgattggcctgatgtatgccgtgctgaaggtgcgttcccccgcgccgcccgcgctggcgctgattggcctgctggggatgctggcgggggaacaggcgatgcgtcatcttttatcccgcgataatcccgcgggcgtgcaggtgacggttccccacgttcagcacctgaccggagcgtcatcatgaaggcctggattatttcgctggtgtgcggggtcgcggctggggtactttacgccctgctcgacgtgcattccccggcgccgccggtcgtcgcgctgcttggcctgttcggcatgctggtgggtgaacagctaatccccatcggacggcgtctggtgagccgcgaaccgttgaccctggcctggtttcgtcatgaatgcgtaccgaagatcagcggtaccgcgcccccagcgcccgcgaaggaaagccgcgacgcgtaacgatttgtttgaggaaagacagcatgacgctgccgtggcgcattgccatcattgatgacgaacgctctgttcgcagcgggctcagtaacctgctgcaatcggaagggtatgctaccgataccttcgattcggcagaggtgtttttgagccaccctctcgccctgtccggcgcgtcgctggtgatcaccgacatcaagctacgcggcatgaacggcatcgagctgtttgagaagctgcggttgctggccacgccgccaccgccaatactgtttatctccggtcatgctgatgaaaatatgcagcggtatgcactcagtctgggcgccgctgcatttttgcgtaagccgattaacatcgatattctgctggatcatattcagcgggagctgacccgccgacaataaggatcgcggatgaacgaacatacgtcgcctgcattttggcccgcccggggaagtctccatgaagggcgggcttttgttctgaaagaggatgtcatttttaccgtgctggcgcaggagggcggcatctcctggatgaacgggcggcatccccagtccggcggttcgtttattattgccaccgcggtcagcgatgaagaagaggagcgggccacccggctgctgaaaaacgagtttgccctgcgcgatcggcttcatgacggctgggctatccggcccgtcgcttcaacccagtaccgtggacgttttgcgctggtctacgcgccgttctgctttgaactgctggcgtgccgggcaggtaaggcgatttccgggatcgcccgctttatcgaaatggcgatccgcatctgcggtcccctgcgccagatgcatctgcacaacctgatccacggcgatatcaaacccggggcgttcttcgttcatcacgacgccacctgccgtctttgcagcttcggtctttcctgcggcacctccgacgcgttcacccagtcacggcttgccgcgtctggcggcacgcccgcctacatgtcaccggaacacaccacgcgtacccggcgcgccgtcgacagccggagcgatctctacagtctgggtatcgtgctttatgaacttctgaccgggcgattgccgtttgaactgagcgctgatgaccagaccaactgggcgcattaccacattgcctctgagccgcttgcgccggggcgggtgcgcccggacgtacccggcatgctgtcgaccattatccttaagctgctggagaagaatccggagaatcgctatcagaccgtcgacgggctgattgccgacctcaggcgctgccaggcgacgctgaccgccgaaggtgagatcgtcgactttattcccggccagcaggatcgctctccggcgatccatcttgccgattcgcttttctctgcgcatccgcaggccagcgacgtcatcgccgcgtttgagcgggtcagccagagcggtgcgccggaactggtgactattggggggccttcggggatcggcaaatcttccgtgatcgccaccacgctgaaatcgctgcaacagcgcaaggtgctgctggcggtgggcaaggtcgatcaatattctcccacgttgccctacggcgtgctgagttcggcgtttcggacgctcacgctgcacctgctcgggctgccagccggggaggtagcgacgtggaaaatccgcctatcgcgcgcgctggaaggcttcgaggagctggccgtcagcctggtgccggagctgaatttactccttgagaacaaaccgcgtttctctgcggataccttttccatcgacgcgcgggcgcgcttcagccatatgatgctggcgctggtgaaagccttcgccacccagggcgcgccgctggtgctattgctggataatgtgcagtggatcgacgccgccagcctgcaaacgctcgatcacctgctgcgcgcctgcggcgccatcccgctgctggtggtggtggcgcaccgcgatctcagttcgctttctgagcccaccttgcagaccgcgctggcgagcctgccggaggcggcgcaacacgccacgacgatcgtgccgcagccgctgtcggtgaaggccgtggcgcgctggctcggggggatttttcatgcccgcagtaccggtaccgccgatcttgccacgctgatccatgaaaaaaccggcggcaacccgctgttcgtgcaggaatttttccgccgcatcgtcgatgacggactggtggtgcacaacaaatatcaggggaaatggcattacgatctccaggccatccgcgcccggcactacaccgagaacgtggtgacgctggtgcttgaacagctcaaggagatgcccgacgagacgcgccgcctgctgggcagcatcgcctgcctcggctgcacgggcgagctggagatgctgtgccgcgtggtggggcggtcggcggcggaaatccgctacgcgcttcatccggcggtgaccgctcagctgattgtgctgacggagaaagagtacgcttttacccacgatcgggtgcaggaagccgcctttgccctgctggatgagggcgagaaaagccatctgcacctgaccaccgccagcctgctggcggatgccgcgcggcagacggcgggcaacgaactgctgttccgcgcggttcaccacgtcagcgccgcgctggactgcatccagcctgcaccccagcggcagcgattccgggagctgagccttcaggccgcgcggcgtgcgaagcgtaccggcgattacctttccgccttaagctatatccagaccgccagagcgctggggaatgcgggcccggtctcggactttatgctggatatcgaagaggcgggctgtgagtttgcgctcggacacctggagcgcacgcgtgcgctgtgcgatgcgatcctcggttcaccgggcgggctgacggagaaagcgctggccgccaacctgctggcggaagtttatatgcgccagtcggagatccgcctggcgctggaggcgtcgttatgctggctgggcgtgttcgggatccagatcagccgctacccggaaaatgccgaatgtgacgaggcctggcagcagttctgtcaacgcaccgccgacgcgccgcagaacccgttttctcagcttaagctgatggagaacgcagagaccgaagcggtgatgaacctgctttacagcgccagtattttcgccagctttacctgcccgcgcctgcactttttactcctgtgccggatgatgcacctcacgctcgatcacggcataaccggtgcttccaccacggcgatggcctggtttggcgtgctgattggccaccgctacgccgaataccgtctcgggtttgagtacggcacgctggctcgtgagctggtgaaccgccacggctatgatgcctatgaagccaaaactctgctgccgctcgaccagctcagcgtctggacccagccgctgtcgtacactatcgagtgcgccaaggcctgctttacctcagcggtgacccacggcgacatgacgatggcctgcttcgcggcctgtcatcagatcattaacttcctctcccggggcgatcatctggatggcgtgctgaccagcatcgatcgcggtctggcctttgtgcgcaaaacggattaccaggacattgaaaccgttctgcacattcagcgccgctacgtggagtttttacgcacgccggtgacgggcccatggagcgccgcccaggcgctgcctgacgatctgctgcccgcgccgccggagcaggcgcccgagcagacctcgaccatgctcttctggtactggctctatcgcgggatggcgcacttttcctgcggcgaatacgccgacgcacaggcggatttagaaatggcgggctggtatgcgtggtccgcgccgggtcatattcatctgctggattaccatttttacagcgcgctggcgctctcccgccagctcacgccggaaaccttttcggcggattatcgccgcagtattcatcaccattacgacaaaattgccctctgggcgcggatcaatccgggcacatttgccgataaagaggcgctgatttatgccgaaatcgtccgtctggacggcatgaacagcatcgcgctggagcagtatgaaaaagcggtgcgactctcgcgggagggcgggtttaacccgatcaatgccctggcgcacgagctggccgggcgtttctcgctggcctgcggctacccgaccgcctccgacgcccatttccgcggcgcgattgccgcctggggcgcgtcggggcgcaggnnnnnnnnnnnnnnnnnnnnnnnnnnnnnnnnnnnnnnnnnnnnnnnnnnnnnnnnnnnnnnnnnnnnnnnnnnnnnnnnnnnnnnnnnnnnnnnnnnnnnnnnnnnnnnnnnnnnnnnnnnnnnnnnnnnnnnnnnnnnnnnnnnnnnnnnnnnnnnnnnnnnnnnnnnnnnnnnnnnnnnnnnnnnnnnnnnnnnnnnnnnnnnnnnnnnnnnnnnnnnnnnnnnnnnnnnnnnnnnnnnnnnnnnnnnnnnnnnnnnnnnnnnnnnnnnnnnnnnnnnnnnnnnnnnnnnnnnnnnnnnnnnnnnnnnnnnnnnnnnnnnnnnnnnnnnnnnnnnnnnnnnnnnnnnnnnnnnnagcaggatttcccccatctgctggcctccgggcagagccgcgcgtatgacacggcggcgtttgcccagaacgaggtgatccgcgatttacaaagcgtcatcaaagcctcacgcgccttatccgaagagatcaaccttgaacgtttaatcgaaaacctgatgacgctgctgcttgaacgggccggggcgcagcgtggcctgctgctgcgtgtcagcgataatcacatcccggagattgaagccagcgcctggaccagtaccgacggcgtgcgggtgcgcatcctgaaagcgtcaccgatggcgacggacatgccgctgtcggtgctggccgcggtgatccgcaccgggcaggagatccgcaccggcaaaccggaggagttccacccgttcagccaggatccgtatctggtgacgtccggcgccgccgtgatgtgcgtgccgatgttcaaacaggcgcggctggtggggattctgtatctggaaaaccgcctgatgccggaggtgtttaccgccgaacattcgcgcgtggtcagcctgctgggtgcgcaggcggcggtttcgctggagacggcgcggctctacgccgagctgctggcggaaaacatccagcgccgacgggtggagaaagagctgcgcgccagccagacctcgctgatgctgggtgagcagatcagccacaccggcagctggcgctgggaactggtgcaggatctgatgtttatgtccgaagagtacgcccgtatccttggcctgccggagcagcaaaaaatgatctcaatggcggagtttttgaccttcgtgcatgaggacgattatggccggatcagcactctcgttaaccagagcgtgcgtgacgggctgtcgatgcgcgcggagtttcgcatcatccgcaccgacggctccgttcgctacatcctcgggattggcgatccggtgggcgtaggcagcgaggtgaatgagtattacggtattatcaccgacatcaccagccagcgggcggcggaggatgcgatgcgggtggcgcaggcggatctggcgcgggtctcacgagccactaccgtcgggcaactgacctcctcgatcgcgcacgagatcaaccagccgctgatgtcgattgtctcgaacgccggcgcaagcctgcgctggctcaaccgcgatccggcgcggctggaaaaagtgcgcgaggggctggaggagatcgccgccgagggcgagcgggcaggggagatcatccgcagcattcagtctctgacgcgcaaacaggaccccacgtttacgcgaatcgatctgcacttcctgatccaccacatcattatgctttcccgcagcgaacttgagctgcgacacataagcgttgattatcttctgaacgctgacgacagctttatcatcggcgacagcgtgcagatccagcaggtgttgcttaacctggtgatgaatgcgatggaagcgatggcggaagtgacggatcgcccgtgcagcatcacgatcgccaccgcgaactgcgctgaggggaaggtgatctttgagatcgccgataccggcagcggcattgagccggagctcaccgagcggatctttgactcgttctattcgaccaaagcgcagggaatgggcatggggctgaccatcagcgccagcatcattgaacggcaccgggggaaactgagcgcgcgccgcagagagccgtacggcacggtgtttaccttcgcgttgccgcttgccggacaggagatgtaacggttattccgctggctgatgtttggtcaggcgctcgacggccctgaccagttcagccacggagcggacctgcattttctccatcacccggcggcggtgcactttcaccgtaatctcactgacgcccagctcggcggcgatctgcttgttgagcttgccgctgacggccagctcaagcacctcatgctcacgcggcgtgagggaaagatggcgctgtttcagggcgtagtgctctttgacgcgggcggcgttgtgctgtgccagcctgagcgcggattcgatggagccgatgagcgcgctggattcaacgggcttagtgagaaattcgtaggccccgcctttgatcgcccggacggacatagggatggtgccgtggccggtgagaaagatgatcggtatttcccggccgctgtctttcagcgcatctgcgacatcaaacccggttatcgtgggcaattgcatatcgaggatcacgcaggagggcagatcctcaaagggatggctgagaaaggcctctgctgaggaaaagccaagggcatgtatatccgcagactccagcagcctgacaacggactgcctgactgtgtcatcgtcatcaaccacataaacaatgtgttccattcaccgccccggtgttgatttaaatgtcgaggatgtaaacagtcactatggctacgtaagagactgtttatgctgactttcatcttaacacattaaatatcattatcatttagcaatatgataaccatatgaagtatagcgagctggagcggaggcgatgaaggaacgaaacgctgtttttatgcaccgacaagctcaatacggttgccgtccgggtccgcaatcaccgcttcatagaaaccgtccccggtcatacgcggggcgctgagcagggagccgcttgcctgcgcctgcgctgccatactgtccacctgcgctttgctgccgacgttgatggcgatatgcgcccagccgataaattccgggtgcgaaggtgcactgggcaggcccggcagcgtcatcagctcgatggtcggcccgtcatccagggtaataaagtgagatttaaaccccggacgatttttgctgacgtagcggtcattactgcggccgccaaacaccgtttcccagaactgaacctgcgcgtccaggctgcgggtccagagtgcgacatgtgcaatattcataagatccctcgttatttgtctgtgaggactttcaccggtaaaacaggctacactctggttttgagcgcgacaagctgaggaaacaacaatgcactacacactgaaagaaagcgacaaggaaaaagcggaaggaacaaacggcgcgggcgctctacagcaaaaactgctggaatcccgttcgattgtcatctccggagagattaaccaggagctggcccagaaggtcatcactcagatgatcctgctgcaaagcgtcagcaacgatccgatcaagctgtacatcaacagtcagggcggccacgtagaagcgggcgacaccatccacgacttcattaagtttatccgtccggaagtgcatgtgatcggcaccggctgggtggcgagcgccgggatcaccatcttcctggcggcgaaaaaagagcaccgctacgctctgccgaatacccgctttatgatccaccagccgctgggcggcgtgcgcggtcaggcaacggatatcgaaatcgaagcgcgcgagatcatccgcatgctggagcgcgtgaacaagctgattgctgacgccaccggccagccgctggagaaagtgaagaaagacaccgaccgtaacttctggatgtcaccggcggaagcgctggactacggcatcgtgggtaaactgattacccattatgacgagctgaacctggattaagtttaagcccgcgtgtgcgtcgggtgacggcttcgccttacccgacctacgcgcgctcgattgacccatgacaagttcccccctcgctgtctcttctataatcgcgcctgtctcccctctcactggtgctatccatggcgtatcaactgaacctgaactggccggaatttcttgaaaaatactggcaaaaacaacccgttgtgctgaaaaatgccttcccgaattttgtcgaccccattacccctgatgaactggcgggtctggcgatggagccggaagttgatagccgcctggtaagccatgctaacggcaagtggcaggcgagcaatggcccgtttgagcatttcgataacctcggtgaaaccggctggtccctgctggcgcaggcggtgaaccactggcatatgcccgcagcagagctggtgcgtccgttccgcgtcctgccggactggcgtcttgatgacctgatgatctccttctccgtcccgggtggcggcgttgggccgcatatcgatcagtacgatgtgtttattatccaggggatgggcagccgccgctggcgcgtgggggacaagctgccgatgcgtcagttctgtccgcatccggccctgctgcatgtcgatccgtttgagccgatcatcgacgaagatctggccccgggcgatatcctctacattccgcctggattcccgcatgacggcttcacccatgaaaccgcgctcaactactctgtcggtttccgcgggccgaacggtcgcgatctgatcagcagctttgccgactacgcgctggagaacgatctgggcggcgaacattacagcgatccggatctgacctgccgcgaacaccctggccgcgtggagcagtacgagctcgatcgcattcgccagatgatgatcgacatgattagcaagccagatgattttacgaaatggtttggcagcttcgtctccacgccgcgtcacgagctggatattgccgccgccgagccgccgtattccgcagaagaggtgctcgacgcgctgcaagggggcgaaacgctctcccgcctgagcgggctgcgcgtgctgaacatcaacggcagcgtctttatcaacagcgaacagctggaaacggcggatgtgaacggggcggacgcgctgtgccgcttcaccgagctcggccaggctgagctgggcgatgcgctgaataatccggcgtttgtggaagagctgaccggtttgattaaccagggctactggttcttcgacgagtaacagcaggcggcgtttagtcaggctaaacgccgccaggttcagaccagcatattacaggccttccagtagttaagaagccgctcatcgtcgcgctctttctccgctttgattttcatcgcccgggcaagattttctcgcgatacttcatggcctttttgcacgatgtctaaaaccgcttcaccaagagccagtgaaatttctgcccgattattgcgaatcgtcataaatacctcctcgttggttgcgataatttaattatgaacgggaaataatcagtcggtaataattcatctcattcttattttttcatttcggcgttaagtagacttaatattcggttctgtcaatgatgtttcaaaatgctaataagacgtttaagcctgaatttatgcgctacagttaatttcgtgcaacaggcaaataaccgaaacaggagaataattatggtagataaaagcgcaattaaggatcacactcaggttgtcgccagctgcggaacgcacgtcggggttgtggaccatcttgatggtgagcgtatcaagcttgcgaagagcgatccggaatcgggcggcaagcaccactttattcctctcggctgggttgataaggtcgaagataataaagttgtcctgaccaaaaaccataaagaggtttttgctgagtggcaggaagcataaatatatttctcgcaaggaaatatatgccttcgctccggcttcgtccggagcgtaatagtgtctgcgcccggtgattgctgccattacaaatggatggtactgttttgcctgtcctttccccgatgcaggccccaaatgatgctccagagtgaaaatagatcagcgaaacgcatattttttgttgaagattttcaggtattcggcgagcgctacggcatcgactaccgtttcccccagttaaaagaggcgcaggtcagcggtagccccgtgttgcaggggaatgttgaagagatgatgctctcgtccggcatttcgctgacccactccgacgtacgtgtattacagccctatgaaaccacctctcgccacagcagcccgctctatatgctggtggtgctggaagggtgcgtgacgctcacgctcaatggtatcaattatcccgtccgcccgggcatggcgttcagctcacgtctgagtgaagatcaggtgatgagcgcgcgtcacgatgccgacagcacgctgaaaacgctctcgtttggcgtctacccgcacgatgccggacgtgaagccctgcttgagtcattgcttctggaatggcaaagcctgaatgcacccgcgtttgtctggcaggttcccgagtttgtgatgtcaggtattctgcatgcgcagcggcaggggggaagcgtgctctcacgcaagctgttgctggaggggctgatgtatcagctgctcggccatggcctcaaccagcgccagcagccttgcccaggccgccctgagcatgcgcgtcttgaacgcgtgcggagcctgctggaacagtctcctgaacgggatcatactctcgcgcagctggcagcccttgccgcaatgagcccaagcagcctgcgcagcaagttccgtcagcgctacggctgcacgctcttcgattaccttcgcgactgtcgccttgcgctggcgcgccgctatctgctggaaggccacagcgtgcagcaggcggcttggatgtgcgggtatcagcatgccaccaactttgccaccgcgtttcgtcgtcattacgggatttcaccgggggacgtgcgcaaactccgctaacgtaatttctcctgtcgcgcgaatgcattccgtgtggtttagcatcgcgcatacgtaacctggcggcacgcatagccgtttgcactctcaaaaaggtaataattcttattaacaataagaaatatctctggagagggttatgtttgttaaatcgcgtctggcactgctggtgggatgggttaccggtagcgttgcttttcctttactggcgcaggatgcccaaaaaactgacaccgtggtggtgacctcgcagatgcagtctgcggccaccaagcttgaaacaccggatattgaaaccccgcagtcggtctctatcgtcactcgcgagcagttcgaagagcagggcgcaaccagcgtgcgtcaggccgtgagctacacgccgggggtctacagcaaccagatcggggcgtcaaaccgctttgactacatggtgctgcgcggcttctcggacggcagcctggacaacgtctacctcgacggcctgaagatgatgggcgacaccaactcccacagctcgctggtggttgacccgtggttcctggacagtatcgaagtcgtgcgcggtccggcctccgtgctctatggccgctcatcgccgggcgggattgtggcgctcacctcccgtaagccatcgttcgatcctggcggggagatcaagctcttcgccggtaacaataaccagcgtggggcgatgttcgacgtcactggcccggttgatgataacgaccgcgtggcggtgcgcctcagcgggatgacccgctatgccgattcccagttcgatccgctgaaggaagagcgttacgccctgatgccgagcctgacctggcgtatcaccgacaacacccgtctggatctgatggcctacctgcaccgcgatccggaaggcggcagccactccggcctgccatatgagggcaccgttgtaccgcacagcggtaagaaaatctccaacaccttcttcgagggcgaggacgattacgacaagtacgatcgtcgggaaaacatggtcggctataacatcgagcacctgtttgacagcggctggtccgtgcgccagaagctgcgctacctgcacaccaaagtcgagctgaaccaggtgtatgccgcaggctggctgaatgacaccgagctgaaccgcggctattccggctccgacgagaagatgaacgccatcaccctggataaccaggtcgacggcagcttcgataccggggcggtaaaccaccgcgtgctgatcggcatggactaccaggaccgcaccaacaacgtcactggctactacggcggcttcccgccgattgacgctttccatcctgtttacggcgcgaagccggactacatcacccagtacagcagggaaaaacacaagctgcgccagaccggctactacctacaggatcagatgtccattgaccgctggcgcctcacgctgggcgggcgttacgaccaggtgagcgtgtcgaacgtcgacaacttcaaccacacccgcagcgatctggataaaaataacttcagcagccgcgcggcgctgctgtatctgtttgataacggcgtcgcgccgtacgtcagctactctaccgcctttacgccgaccagctttgccgacgagcagggcaacattttggatccgatgaagggcaagcagtgggaagcgggtgtgaagtatgagccggaggggatgaacagccagttcagcgcctcggtgttccgcattaaccagaagaacattgccactaaagaggagccgaccgatccgtaccgttccatcggtgaaatcgaatccgaaggcgttgaactggaggcgattggtcagctgaccgacagcctgcgtatgcaggccgcgtacacctacacggatattcgctacaagaagagcagcccggaagaggagggcaagcgcgccgtttatgccccgcgtaacatggccagcgcctggctgagttacgacgtcaaaaccggccctctggatggcctgaccgtcggctccggcgtgcgctatgtcaacgggatcgccagcgatcgccagaacacccatacgcttccgtcgtacacgctggtggatatgaccgtggggtatgacctgtcgaaagtggggctcacaggcgtgagcgcgcagttgaacgtcaataacctgacggacagaagctacgtcgcggcgtgtaactcgctctcttactgctacttcggtgcagaacgcagcattgtgggcagcgtttcgtggaagttctgagtcgttgaccattgcccggtggcggtttccaccctctccctttgggagagggttggggtgagggcaacaggccgcactactcctccatcgcaatcacaattgcctcgcccatcttcctcagcgcttcgcggttcttctccgtcggcggcaacgccacgttgatccgcaggcagttgcggtacttcccggaggcagaaaacagcgacccggccgcagcctggatcttcagacggcacagctgcttgctgacgcacaccatatcgaccgtctccggcagctcaacccacagcaggaagcttccttgcgggcgggtgacgcatatctctgccggaaaatactgccgcacccagcaggtataggtttccatattctgctgataaatctgacgcatacggcgcacgtggcgatggtaatggccgtcgcgaataaacgccgccaccgccatctgcgtgcccggcacgttaaacccgcccgcggcgtacttcatgtgcatcacccggtcgtaatagcgccccggcacgatccagccgacgcgcaggcccggcgccacggttttggtaaacgagctgcataagagcacgcggccatctatgtccatagaatgaatggtgcgcggacgcgggtactccgccgccagctcgccgtaaatgtcatcctcaacaatcacgatatcgtgccgctgtgccagggctaagacctgcttcttgcgagactccggcatgataaacccgagcgggttattgcagttcggcaccaggatcaccgccttgatcggccattgctccagcgccagctctaacgcctcgatgctgatcccggtctcgggatcggtgggaatttcaatggccttgatgttaaagccgcgcagcatctgcatggtgccgtgaaacgatggtgactcgactgccacgatgtcacccggcttgcacaccgagagcagagcgatcgacagcgcgccgtggcagccgttggtgatgacaatctcgtttgccgccacggtggagccgccatccagcatcagacgggcgatttgctcgcgtagctccaggcgcccgtcgagcacgtcatagctcagcatttcgcccggattatgctgcgcaatgcggctcatctcacgccacagcggcttcaggctcggttggttaatgtccggtgagccgccgccaaaggagatcatctctttgtcggcgcgggcgtccagcagcatcatcacttcgtcccactgggtgacgtccacggggcgctgtaccgggcgcgtcatcgccgggacgggcggctgggctttgcgtttcgagacaaaatagccggagcgcggctgaggcgtaatcagctggcggttttcgaggatctggtaggcctgctgtatggtgctgatgctcacgccgtgctcctggctcagcgtgcgtaccgacggcagacgttcaccgctgcgatacagcccttgttcgatacgttccgccaggaggttggccagatgttgatagcgcgtcatgctgtatccttttttttcaccatgcagagcattaaaccagtacagattgatgggtaaaccaccatgcagataccgttttagcggatctgtatggtaaacaaaagcggtttttgaatctgtattgtactggccgttttccatgatgataactccactggcacagcgaggagagcatcatggaattctacgagaatcgttcaaaacgtccgtttatcgcgtttgtctggatagcgaaaacgctgcgtaactggtatcgcatcaaccgtacccgccgtattctgagccagatgagcgacgagcagctcaaggacgtcgggttatcgcgatatgatgtgtgagcatagggttgcccggtggcgctacgcttaccgggcctacaggagaccgtaggccgggtaaggcgcagccgccacccggcggttttcagctcaacagcgcaagcgtctgccgtttcggcctttccagcagctcaaccgcctcctgatatgaccgcacgttgttatagcccatcaccagcccgtagcgtttgcccgacccgcgataccacgccgaaagcgcattgacctgcaattgctgttcctgccagcagcgggcgatctcccggtcagcgcttccctttgcgaggaacgcgacaatatgcattccaccgtcgttttgctcggtgaagaacagatcaccatagacctcacgcagggcggcaatcatccagtcgcggcgggtttgatagagcgcgcgcatctttttcagatgacggaaaaaatgcccctcgttgagaaacgtggtgaggattttttgcgtcaggaccggctggccgctggtgaggatgtccgcgctgtcggtaaacgcgccgacggtgctggcgggcatcaccacgtagcccatgcgcagtgaaggcatgatggttttgctgaaggtgcccataaagatcaccctgtcatgctggtcgaggcttttcaacgacggcagcactttgcgggtgtagtgaaattcgccgtcatagtcatcttcgataatccacgcctcgttttgtgacgcccagtcgagcagctgctgcttgcgcggcagggagagcgtcaccgccagcgggctctggtgcgacggggtaacgatggcgaagcgggcatcgtggtgattacgcagcaggtagtccgtatccatccctgcgcgatcgaccggcacggtgtgcaggcggggcacaatgcgcttgagcaactgctggcccataaagtagcccggatcctcaaataccaccttatcgctgcggctggcgagcgtgtcgaggatcaggcgcaggctgccgctgtagccgctggtgatcagcacctgttctgcggtgcaggacaacccgcgcgagatattgagatagcgggcaattgcctcgcgcagcggataccagcccagcaccggcgggttgagcatttcatcctgacgcatggcgcgcgtcgcctggcctgccagcagcagccattttttataggggaagctgtcgagcgcgggaatgccggggcgcagaaaaccggcccgttcgcgctggctaatcaacgacgccggcagcgtgccggtcgcttgttctgccggagcgttttgcgcgggcagcagaagatccggattcacccgcgtgccgcgcgcgccctggcttaccagatatccttcccccgtcagaatggcataggctgtttcaacggtttttcgcgccaccttaagctcttcagccagcacgcggatggcaggcactttgtcgccgggcttcagtacgccgcgcgtgatgttatcgcgatagcgggtataaatgtcgtgatagcccggcttcatgtcctacctcatttcaggttttttgtgtctttttactatgtcattaacggcgtagatttgcctcatcgcatgataaaaaccgcacaaaaaagaggaaagacaatgagcacccgcgtaaaccaccacaaagccacacctgcactcgccaacgcgctttccgccctgagcatggaagtggcgaaaacctccattgatccggcgctgaagcacctgatcgacattcgcgtctcgcagctgaacggctgtaccttctgcctggatatgcattcgaaagaggccaaaattgccggcgagcgcgagctgcgcctgtaccatctggcggcgtggcgggagtcgccgctgttcagcgcccgcgagaaagccgcgctggccttcaccgaagcgctgacccagattggcgttcacggcgtgagcgacgcgctgtaccgcagcgtggcggagcatttctcggacgtggaaatttcagagctgaacttcgccatcgtagcgatcaacgcctggaaccgcctgggcattacctcccgcatggagccgggctcgctggatgcggcatatgggctgaacnnnnnnnnnnnnnnnnnnnnnnnnnnnnnnnnnnnnnnnnnnnnnnnnnnnnnnnnnnnnnnnnnnnnnnnnnnnnnnnnnnnnnnnnnnnnnnnnnnnnnnnnnnnnnnnnnnnnnnnnnnnnnnnnnnnnnnnnnnnnnnnnnnnnnnnnnnnnnnnnnnnnnnnnnnnnnnnnnnnnnnnnnnnnnnnnnnnnnnnnnnnnnnnnnnnnnnnnnnnnnnnnnnnnnnnnnnnnnnnnnnnnnnnnnnnnnnnnnnnnnnnnnnnnnnnnnnnnnnnnnnnnnnnnnnnnnnnnnnaggctaacctggagtaatcccgcgctcgcggattatcgccaccagcgcccgtaagcctggcgggacgtgacgatggcgagtgggggattcgggcgtttatggagccgaggtcgattgtgggttaaaccctgcccggtggcgctacgcttaccgggcctacaaaacaccgtaggccggataagcgcagcgccatccggcaaacacttcgctccataccgaagcatccacaccattagtcccgcattctctccatatcatcacaacggagagaccttcatgatcgcagtccttttcgaagctaaagctgcaccggcgcatcaggcgcgctatcttcaacttgccgcagagcttaagcctttgctggccgatatcgacggctttattgatatcgaacggttccagagcctgacgaccgacggcaaaatcctgtccctttcctggtggcgggatgaagaggccgtccgccgctggaagcagaatgtcttccatcaggccgcgcaggccgaaggccgggcgtcgattttttctttctaccgtattcgcgtggcgcagctgatgcgggagtacagctccgaaacgggagggcacgcgcatgtatgacgttcatgtgattttcgacaacaggcccggcgagctgggtgaaattgcggcggcgctggaaaaggccattgccgctgtagcggctgcaatggccgatccgtcgcgcgtgaagatgctctgtgctctgatggacgggcgggcgtggacggctacagagctgagcgtggcggcagacgttgcgccgtcgaccgccagtgggcatctcgcgcggctggtggagggaaagttgattacctgcctgtctcaggggcggcatcgctactatcgcctggcgggacacgacgtggcggcgcttgtcgagcagatgatggggctctcctggagccgcatcacgccgccggaaacctccgcgccaaaagccctgcgcgaagcacgaacctgctacgaccatcttgccggaacggtggcggtgcatatctatgaattcatgcaggcggaaggctggcttgaggcagacggttcagcgctcacgctacatggccgcgagcagtttctgaagcttggtattccgttaaatcccaatacccgtcgcaaggcgtgctgcgcctgcctggactggagcgagcggcggtttcatcttggcggtgaggcgggcgctgcgctgttgatttatctggaaagcaaaggctggatccagcgggtggcggggtacagggaggtggtggtgacggcttcggggaaaagtgccgtcaggaagcattttagccgctaaacgccgttgcgggctgatgccctcaccccgaccctctcccatagggagagggagaacatcgtttcgcaattcctgcgctttaacttctcgtttcttgatacttaccctgataactattatcgtaatggcgtactacgagaggattccccatgagtgaagaagatctgtttagccgcaggccgatgggcatgcggatggcgatgatcgtgcgtcagtggcgcgcagtcatcgacgacgccattctcgacaccgggttaacccagtcgagctggacggtgatgatgcagcttcatcaacttggggataacgtctcggtcagcgagctggcggaagtgcaggggattgaactgcctccgctaatgcgtacgctgacacagctggaaaagcagggctacctgctgcgcaccgtctcgccgtatgacaagcgtatccggctgctgacgctgacgcctgagggaaaagccattcttgaaaggctctctcaggtgattgagacgtatcaggcgcgcgtatcgcaaaacatcgcgccggaacatctcgatattttcagcgccacactcaatcaaatcgcctgcaatttgcggacaatccgcgaagaagataataagaccgaaaaataatgactcctgaacaaaagtttgcccgctgggtaagggtgagtattgcctctttcctgctgatgtttgtctactttatcgtcgcggatatctggatcccgctgacgccggactccaccgtgatgcgcgtggtgaccccggtgtctgcccgcgtctccgggtatgtggcggcggtacatgtccacaacaatagccaggttaagagaggcgatctgctgtttgaactcgacgccacgccgtttcgcaataaggtcgaagcggcgcagattgcgctggaacaggcgcgtctgtctaacgatcagctggacgcgcagattgccgcggcgcaggccagcctgaaaaccgcggtgctgacggcgcgtaatgacaaagttaccttcgaccgctaccagaaactgagtaccttgcagagcgtgtcgcaggcggatctggataaggtccgtaccacctggcagagcagcgagcagtccgtcagctcgattcaggcgaatattcataacctgcgcattcagcgcggcgagcaggacgagcaccacaacgtgacgctgcaaaaataccgtaacgcgctggatgaagcggagctgaatcttggctggacgaaggtctacgccgaggcggacggcacggtcagtaacctgcaattaagccccggtttttacgcctcgtccggttcggctgcgctggcgctggtgaacacccggatcgatatcgtggcggatttccgcgagaagagcctgcggcatacccaccaggggaccgacgccgccgtggtgttcgacgccttcccggggcaagttttccgtgcccacgtcaccagcagcgacgcggggatcctcgccggacaggaggccgtaaacggtcaactttctgaaccggaaacctccaaccgctgggtgcgtgatgcccagcgtatgcgcattcacgtggcgctggacgaagccttaccgaagtcgctgccgaccggcgcgcgcgccaccgtgcagctctacaatagcgaagggccgtttgcgcgattcttctccgggatgcaaatccatctggttagcctgcttcactatgtctattagcaccctggcgcgggtatttaccccgcacggcaacatcgtctatacggcaaacgactttcgccagaccctgcgtatcgtctttgccgggatgattgcgctcagtatttcgagtttctacaacaccagctatggcgtgttttttgtggtctatccgatcatgctgctctcgctggtgccggtgtttaaccgccacgtggcgaagcagtttatcttcagcgcctcgctgaactgcatcgaaatggtgtttatcatcggctatctgtcccagtggccggtcattatgacgctggtggtgtttgccctgtacgtgatgcgttttcgctttatgagtaaggggccgctgttcctgttcggctcgatgggcgtggtttgccagagcgtgatgctcaactttatgagctaccccaccaccaactggcacacgcttttattctctaacatcgaagcgagcgtaatggcggtgtgcctgagcgcgctgatgaactacctgctgccggacgtggagccgcgtaagccgccgccgctgatcgagaaagatgacgcccgcgtgcgccacgagtctctgctctcgggcaccgtggcgacgctgattttcgtggtgttccagatgagcgacttaagcgattcgctttcggcgctgatggcgggcattctgatcctgttcccgatgcactatcgcggctcggttatcagctccatctggcgcgtagtcggcgtggtgctggggtgtctctatatccttgtcgtccagcttatcctctacgatcacagcagccatatgctgctgatgatgccgctgattggccttggactggcgtttggcgcgcgtctgcacgtaatggagaaggtcggcgccggggtaggcttcgccagtatcaccaccatcggcattatgttcgggcagaacatgcatccggacagcgacctggtgttcagcgatctgtaccgcatcacctccgtcaccttcgcgctggtggtcacgctgacgatggtctttctggtgcacctgatcctgaaccgcttcgaggcgacgcgctacgttatcgcgccgccaaaagcagattaatgccccagcacggcgggcaactgcgagagcagaaacaggatcaggccaattgttccgcccaccagggtaccgttaacgcgaatgaactgaagatctttaccgatattgagttctatctggcgtgacatgtctttggcatcccagcttttcaccgtgtcgctgatatggcgcgtcaggaacgcggcgaaatccggcgccacgcggtgcgcggcctgctccagatgctcattcagcgacgcccgcaggctggcgtcgttggtcagcgtttcgccaaaccacagcccggcgttggcgatacgctgcttcacgcgggaatcatcgctctgcatgtcatttttcagccactggcgcaggtcagcccacatttcccccagatagcggttaaaggcttcgtcattcttcaggtagtgtttgatattctcggctttcgccgtcatctccggatcgtttttcagattgtcgatgaacttgatcgtggcgcggtcaaacgcctgacggatctggtgcgtgcggtcgtggctgatatcgtccagcagcgtgttcaccgcgttcgacaccatctccgcgctttgatcgcccagccactcggtgggcagcaccatcgccttgcgcggatgctcggtcttaagccagtggacgatctggtcggcaataaattcccgcgtgctttcccgctgaatcagggtaatcaggcggttgatgatggcgtccagcagcacctggtgacggttgtttttggtcatgctttccagcatgacggcgctggtctcggttagatcgaccttgtcgatagccttgtggacggcgcgtttgagcaggcgctgaatgcgcccatcgtcggtaagttccagaaaaccgctcatcacctgcaccagatgctgccccacgcgccgggcgttatcgggctggctgaaccaggtcccaatcatctgtgcgggctcgtagcgacggataagatcgacaagggattgcgtatcgagaaacttttcctgcacgaactggccgagattgtcgccgatgcggtctttattgcgcgggataatcgccgtatggcgcgagataaagggaattggcacccggcggaacagcgcgacaacggcaaaccagtccgccagcgcgccgaccatcgccgcttcggcaatggcctttacgccgcgcacccagaaggtttgcggcaggaacagggtggtgataaacgctgcgacggcaatcagcagcagcgacagcgcgagaagcttggcgcgtttgagttcggtatgtttttccatgggttaaggatagagggatacgggggaaaagtgcaaagctgcacgaggccagtcatctcactttctggaatgctccttcagaaatcaaatcaaaacattgtctttttcgttcaaatactgctctgtttgtatatgcttttttgtatatacaatcagggaagggtacactatgcctatagagtatgaatgggatagcaataaggcgaaaagcaatctgcaaaaacacgccattcgttttgaagatgcagttctggtttttgacgatccctgccatttgtctgttcaggatcgttatgaaaacggggagtttcgctggcaaaccattggtcttgtacagggtgttattgtcattctggtcgcgcacacggtacgttttgaaagcggggatgaaatcatacgtatcatcagtgcgcgtaaagcggatcgtaaagagaggaggcgttatgagcatcgttaaacataaacgcggtagtgcaccggaagtgagtgcccgccgggaggctgaactcaaagcgctggcggataaacccgacagggaaattgattacagcgatataccggccacggaggatgatcgctgggccggtgccgtgcggggaaaattctatcgaccgctcaaaactcaggcatcagtacgcattgacgnnnnnnnnnnnnnnnnnnnnnnnnnnnnnnnnnnnnnnnnnnnnnnnnnnnnnnnnnnnnnnnnnnnnnnnnnnnnnnnnnnnnnnnnnnnnnnnnnnnnnnnnnnnnnnnnnnnnnnnnnnnnnnnnnnnnnnnnnnnnnnnnnnnnnnnnnnnnnnnnnnnnnnnnnnnnnnnnnnnnnnnnnnnnnnnnnnnnnnnnnnnnnnnnnnnnnnnnnnnnnnnnnnnnnnnnnnnnnnnnnnnnnnnnnnnnnnnnnnnnnnnnnnnnnnnnnnnnnnnnnnnnnnnnnnnnnnnnnnnnnnnnnnnnnnnnnnnnnnnnnnnnnnnnnnnnnnnnnnnnnnnnnnnnnnnnnnnnnnnnnnnnnnnnnnnnnnnnnnnnnnnnnnnnnnnnnnnnnnnnnnnnnnnnnatggagtggcttaaacggccagggaaaggttaccagacgcggcttaatgccattttgcgcgaggcgatgctgcgcgatcagaacaaaaaataacacaggcagcgtcaggctgccttttctctcagaggatttttgccactacccgccacagcacccacccaccaaaccccatcaacaccacccccgccgtgcgctctatcagccagagcgaacggctgagctttcgctgaaccgccggtaaccccatcagcgataccagcgccagatcccataccagcaccaccatcaccatccagacgccgcaggtcgcctgctgaagcagtgtgacgtccggcccgagtaacgctgtcattagcgccaggtagaacaacgcgtttttgggatttaacagcgccgaacccagccccagcaggatttgcttacgcagagaagggcagcgctggcgggtttcttccagcgccagcggctgcgggcggctgcgcacaagatgcgagccaatccacagcaggtacagcgcgccggacagttcgataagcgtaaacagccacccaaactggcgcagcgcgctccagccgataatcaccagtaatatatacaacccgttacctgctgcgatgccgagacacaatccggcgctgccgcgcagccggtagcgggcggcgtagcctaccagcaggaagaaatccgggcccgggcttaacagggcaacaaaatgcgccagcgccagggcaagaaaggcggagggaaataacagttccatagcgacctcagtgacaaatctgaggtcacattacgacgttacgtatcctgattattgtctgatattgatcggcccgtggcgtactggcgcggcgtggcagcggtataattcacgaaggtcttatgaaaatgactctggtcggcaaacccgctctggtagcccacgtcggcgatatcatcccccgcgcgcagccgcgctttggcgtactccacgcgcgaaatgttgaggaaactgcccggcgtcaggccggtatcctgcctgaaagtgcggatcagcgtctccttgcgcagtgagaatcgttgggcgagttcgtcaagggaaggcggtgcggcaaggtcggagagtaacgcctgctgaacctgctggctggttgagcgaggtgcattcatctcacccgcgcaacggggaagggcagaaagcagggtctccacggatgcggaggacatcgtcccgacaacggcaagaaagtgcttaaagagcgtgggatcgcgaataacctgtagcgccaggggaagatcggtgtcgatatagagcatatggtaactgcgcggcttcccgacaacggggttgcagctgtgcggggcataagccgggatcacgataagatcaccgggatcaagaacgtacgcattgccatgacttacgcagcaggtctggccttccacaatcgcgccgatggagagctgtggatggcaatgacgtttgtatgcccgggtgctttgccacgtactgcgcagctcaaggcctgctgcgcggttaaaggtctggcggatgtggcgggtatcggtcataggaactccattgatgagcattttttataccatgtctgcgcatcgcctggcagcgtcttgttaagaaccctccgtatatacccaactttaccttcaaagccagtcagattgactacccttaataccctaagcggtaaaacaaggagattcgatatggcttaccagacagtaaatcctgccacgaaccagctcatcaaagaatatccctctcacactgacgcagacgttgaagcggcgctgaaggcagccgatgcgctctatcactccgactgggcgaaaggcgacataagccagcgcctgccggtgctgcataagctggcggacctgatcgacgaacgcgtggaggatctggcgaaaatcgccagtcaggagatgggtaagctcatcgaacaaagccgcggcgaagtgaagctgtgcgcgcaaatcgcccgctactatgcggacaacgcgaagcagttcctggccccggtgaagtatgactctgaactcggggaagcatgggttgaacatcaccccatcggcgtgctgatggccgtcgagccatggaacttcccgtactatcagctgatgcgcgttctggcgccaaacctggcagcgggcaacccggtgatcgccaagcacgccagcatcgtgccgcactgtgcagagacctttgcacagctggtacgtgaagcgggcgcgccggaaggggcgtggaccaacctgtttatctcgtccgaacaggtggcgaacattatcgccgacaatcgcgtacagggggcggcgctgaccggttcagaaaaagcgggtagcgtggttgcggcacaggctgcgaagcacatcaaaaaatcgaccctggaactgggcgggaacgacgtgttcgtggtgctggacgatgccgacctggataaagccgtgaagatcggcgttaacgcgcggctgaacaatgccgggcaggtctgtaccgcggcgaagcgctttatcctgcatgaaaagattgcagacgccttcctgagcaaattcaccgaggcgtttaagcaggtgaaaattggcgatccgctggacgaaagcaccacgctggggcctttgtcatccaaagacgcgctggagacgctaactaaacaggttaacgaggcggtgaaaaatggcgcgaagctgcaccatggcggcaagccggttcagcgtgacggaagcttctttgagccgaccatcctgacgcatatctcgcgtgataacccggcgtacttcgaggagttcttcggtccggtagcgcaggtttacgtggtgaaaagcgacgacgaagcggtcgcactggctaacgattcccactacggtctgggcggcgcggtgttcagccagaacatcgagcgcgcgaagaaaatggcgtcgcgcattgagaccgggatggtatacatcaactggctcaccgacactgcggcagagctgccgttcggcggcgtaaaacgttcgggttacggacgcgagctgtcggacctggggatcaaagagtttgtgaaccagaagctggtggtcgttcgcaagtaatgcggtaataaaaaaaacctgccatccggcaggttttttattaacggtcgcatcgcctttcttgccgggtggcgctgcgcttacccggcctacaatcaatgtgcaataattttaatacattgcacccttcattgtaggcccgtgcaagcgtagcgccgccgggcgaaacgcgcaaacaggcttagaaggacactccaccgcctacatatgcaccatcgatcagcgtgtggtttggacgaccgtctttaccgtctacgctcacgtggcgatagcccactttcagcgtgacaggtttgactggcgtccagcttacgccgccgttagcttcaacatagttcttcacgctgttgttcaggccgtctggcgccacataaccttcaccaaacacgtgaatgctgtccgtaagcgcaacgttaacgccgccgccaatcgggaatgccacgccgttatcgccttttttcgggccgatgtagatggctttcgcgccagcattcagcatcaccggacccacttccaggttgtagcctgccccaacgccgccggtctgggtgccgtcatcggtgtttttcagccagttgctctccgcatacaggccggatgaggatttccccatttccagattgaggttagtaaagtttttaccctgctcaatgctgccacccatggccagtgcggagcccgatacggcggtcagagcagaaaggatcaggatgttaagttttttcatgagtgtttcctcgtcattaaattaatctgagggcaccttaacaagcgatgtttatgactgcaaatgtgataggtctcgcatttatatgctgtttgtgttgggtttttgaatggtaaatgttgatgaattgtttatatggcaaatcgtcaatgtccaatacattcgcgtttagggacagtttacattcctggctaaacgtaaaatgaacgaggcgaaaatagtccttcgccatgaattaattgggtttctaataatttccaaaagtatttcagctgacacagataaagacagaggtttacatttctggtgattgatatacgtccgtacgcgccgcttcgttgccattacatgtcatttttctgacacgtttcttcattacgttgttggcttcacttactggatgctaacaatatgaaaagaaaaattattcctgtgctagtcggttgtgcgctctctttctctggcctggcggcacagccaaccgcggagcgctacgtcgtcagcttttccgaaggcgcgcatgtcaaatacagcggtgcgtttgccagcgcattcccgaacgggctcccggtggggatgggttcgggtttgttattcacgggcaagcagggcgatgcgctgacgtttgcgaccgtgaccgatcgcggtcctaacgcggattcgccaaaaatggggaaaaacgatgccaaaatctttgttaccccggatttcgccccgctgctgatgacgatccgtgtgctaaacggcaaagcggaggccgtggacgcgcgaccgctgcatgacgataaaggcgagatcaacggcctgccgctgcaaagcggcgtgattggatctaccaatgaagtcgcgctaagcgacaccttaaaagtgctgaaaggcgataaccgcgggctggatacggaaggcatcacgccggacgggaagggcggttactggctgtgcgatgagtatggcccgttcctgattaacgtcgacagtaaagggaaaatcctcgcgatccacggtccgcaggcgacggaaggggagaaatccatcgcgggcggtctgccaaacgttatcaaatggcgtcaggcaaaccggggctttgaagggctgacccgcatgccggacggacgcattatcgccgccgtgcaaagcacgctggatatcgacgggaagagcaaaaaacaggcgctgtttacgcgtctggtgagcttcgatccggcgaccgggaaaaccgcgatgtacggctaccctgtcgacagcgcggcctacagcaaaaacagcgacgccaaaatcggcgacatagtggcgctggataaccacaccatcctgctgattgaacagggcgaggataaaaatgacgccatgcgtaacctcatctacagggttgatctgagcaaggcgagcgatctggcggccttcgacaagccgggcgaatacccggagtttgatgatgagaaaacgctggcgcagcgcggcatcacgcttgcggaaaaaacgcaggtggtcgatctgcgtgcgctgggctggcagcaggaaaaggccgaagggctggcgctgattgacagcaaaacgctggcagtggcgaacgataatgactttggcgtgaaggtggcgatgcagaagccagtcgaaggcaagaagctcaaggattatcgggtgaacgcgcagggggcgctgacgctggatgacaaaccggttgaaaccaccctcagcgtgaagccgttgaagaaaccggagtccgacagcgagctgtggattgtgacgctgacggaggcgttgaaataagtttccccctcaccctaaccccctccccgcgagggggaggggatgatcggtgaggttatttcttcagccccgcaaacgctgcccgaatttcttcttccggcagctgtattccaataaacaccatcacgctgtgcggcgcttcatcgtcccacgggcgatcccagtcggcgctgtacaggcgctgcacgccctggaacagcaggcggttcggctcgccgtcgatccacagcatccctttatagcgcagcagcttgtcggcaaatgacagcagcaggttctccatcacgcgggagacctcgctgatgtccaccgggtagtccagctccaccacaatcgacgtcacgtcgttttgcttgtcggacataaagtggaagcgcggtttcgcggtgacgttctcttccagcataaagccgttggtgttgaacagctgagcgagatcgatatcgccatgcgtcaccgtgtaaatgggcgcacgcgagttgatgcgcgtcaggcgctcgcgcagttttttgctttcacccgccacgtcggttttggtcagcaggatgcggtcggcgtagccaacctgggactgggcgatggtgaactggttcatctgctcgtcggcatggaccgcatccaccagagcgatgacgccgtccagcagatagcgctggcaaatgatctcatgagagaaaaaagtctgaataatcgggccggggtcggccatgccggtgcactcgatcaccagtcggtcgaagtcgatgtcaccgcgatcgcggctgtcgagcaggtccagcagggcgtcttctaattcgttagagcgggtgcagcagatgcagccgttggtcagggttttgatctgggtggcgcggtcgccaatcagctgatcgtcaacggagacttcgccaaattcgttttcgatgacggcgattttgaagccgtgctgctcgttcagaatgtggcgcagcagggtggttttaccggcgccgaggaaaccggtcagcagggtaacggcaatcggggtcatggtttctcctttagcagcagcggacgccgccttctccacttccgccgtagcgcgcttcctgacgctcgcggaagaattcagtgtaggtcatgtacggcttatccggatggttggtcttcatatgctcaacgtagttgtcatagtccggaatgccaatcagcattttcgccgcctgaccgaggtatttttttgcttcgcctaagttaccaaacattgagggttccagatagaagaagcccggtgacgctacgcttaccgggcctacagtaacatgcttaattaatggtgtgaggaggtcttcacgccgccttccggcaccggtacgtacggggtctctttgtccgtacggccctcaacgttacgcactttcatccaggttttgatgccgtagaagataatgctgtacaccaccaccaggaacagaatgctcagacccgcgttggtgtagttgttcaccacgatatggttcatgttggcaatctgctgcgcggtcagatccgcgccgcctgcggcaatcttctctttgtactggttagccatgaagaagaagccttccagctgcgggttggtgctgaacagtttcagacccagcgcccaggtagtgcagagcagcagccacagcgcaggcaccacggtgacccagatgtatttggtgcgtttcatcttcacgaggacaacggtacccagcaccagggccacagccgccagcatctggttagagataccgaacagcggccacaggctcttcacgccgcccagcgggtcaacaacgccctgatacagcagataaccccacaggcctacgcagcccgcagtgcccagaacgccggccaccagagagtcggttttcttcaggaatggcacgaagttacccagcagatcctgcaacatgaagcggcctgcacgcgtaccggcatccagcgcggtgaggatgaacagcgcttcaaacagaatgccgaagtggtaccagaagcccatgtccgcccacggcagcactttgtggaacacgtgtgcgatacccaccgccagcgttggcgcgccacctgcgcggttcagcacggacggttcgccgatgtctttcgctgtctgcatgatctgctcgggcgaaatcacgaagccccaggagctgacggtcgccgccgcgtgcgcgctggcgtctttcagctgtgccaggatcagcgcggtattttcgccgcccatctcatgcaggtttggcatggtaatgccgagacccgctggcggggtgttcatcgcaaagtacaggccaggctcgataatcgacgccgcaaccagcgccatgatcgccacgaaggattccatcagcatcgcgccgtaaccgatgaagcgcgcgtcggtttcgttggccatcagcttcggcgtggtgccggaggcgatcagcgcgtggaagccagacacggcaccgcaggcaatggtgataaacaggaacgggaacagggcgcctttccacagcggaccggtaccgtcaatgtactgcgtcaccgccggcattttcagctccgggttgatgatcacaataccaatggccagcccgacgataacgccgattttcaggaaggttgccaggtagtcacgcggagccagaatcagccacaccggcagcagcgctgagatgaatgcgtagccgatcagcgcgaaggtgatggtggtgtctttaaaggtcagcgccggaccccagtacgggtcgtgcgcaatcacgccgccgaagtagatggaggcgaccagcagcacgataccgatgatcgacacctcgccaacgcggccagggcgcaggaagcgcatgtagatgcccatgaacagcgcaatcggtacggtagagcagacggtgaagacgccccacggactttcggccagcgctttcaccacgatcagggccagcaccgccaggatgatgatcatgatcaggaagcagccgaacagggcgatcgtgcctggcacgcggcccatctcctctttgatcatttcgcccagcgacgaaccgttacggcgcgaggagataaacagcaccataaagtcctgcaccgctcccgccagcaccacgcccgccagcagccagagcgtacccggcaggtagcccatctgcgcagccagcaccggaccgaccagcggacccgcgcctgcaatggcggcgaagtggtgaccaaacagcacgtaacggttggttggcacgtagttcaggccgtcgttgttaataaccgccggcgtggcgcgcgtcgggtcgagcttcataaccttctgcgcgatgtacaagctgtagtagcgataagccacaaggtagacggaaaccgacgcgaccacgatccacagggcgctgacgtgctcgccccggcgtaatgcgacaaccgccagacagaaagcaccgatgatcccgaggatggcccagggcacgtgcttaagttagttttttagtatccataataagacctggttttttatgtaaagaaaaaagggtcagggttcgttgtgaggaggtattgattaatgctggagcgatcgtgccagatcctcgcgcgtgtaaagcacggtaaatgggtgagtggttgaaagcgatgcgtgagcggtcaaaagcgagggtgagtggttaaggctcacccccggtgggagaaaatatgtgattgagatcactgagaataatctagccctgtggacttttgtcgttcgcttcagggtagtgtacgcagcggcagggctgatacgcgggcagcagctgatagcgccctttgccgtcgtgttcaataatcggggaaagcgcctgtaaatcgcggtacaccgtgcgttcggtaatgccaaatttttgcatcagatcgcggcgattaacgcttccgttgcggtgcagggcaataatgatttcaaccagacgttcagccgagcggcttcggggtgaaggggccataagactttccagcgttaagggggcggctgacgacgttgccagccgccccggaaaatttatcttatggatagttaacggcgcacctttgcggaaaccttagcgtttttttgtgcaacgggatcaaatcgcggcttccatctccatcatcaccgggtggaaacggcgtttgaagtagatcaggccgtgcccctcgctgctgaggatgatgttcttaatctctacaaggtagaccagatgggtgccgatggtttgcacctgggatatctcaccttccaggcttgccagagcgcctttcagcaccggctgcgccagcggtcctttctgccagcaggagagagcaaagcgctcctccattgccatgccggtcatcccggcaaagtggcgggccatgatctcctgctcgtggttcagcacgttgacgcacagtctgccgttgccctggaagaccgggttcatggcgctgttggcgttgatgcagaccatgaccgagggcggggtgtccgtgaccgaacagacggcggtggcggtaatgccgcagcgacccgcatcgccctcggtagtgaccacattcaccgccgccgacaggctggccatcgcgtctcgaaaacgcaggcgttcttcagattgcattgaaacctcccgctgcgttatttcagcagcttatccagcatgttgatatcagtgttgttgtgcaggtgcggtacggtccagccgtgctggtcgtactcggacatgcagcggtcaaccatcgccatcatcttgtccatgttgccggagctttgcgcctgacgcaggcattgcaggcggatctcatcctggctaccggagtagttgatttcgtacagctcgtgacgtccgccaaactcgctgccgatggcatcccacatcagtttcagaatcttgatgcgttcgacatgatccatcccgttggagccgcgcacgtacttcgccaggtactggtcgatctgcgggttgttcaggtcccgcgcgctggacggcaggtagatcagccccgaggtcacgttacgttcgatgatgttcttgatcttcgcataggccattggtgccatcacgcggtaagtctgtaacgccgcgtggtcaggcagatacgcgccgtttacccacggcgtggcttcggagcacatggagtcgctcagcgcccagaacatgttgcgccacgccaccacttcgccgagatccgcctgcacgccgcggaactcgagggtgccggtacactccagcgacttcttcagcagagcggtgatgaagtcgagcttcactgccagacgcacgcaggcctgaagcgggtacatgcgggcgaagccaccttccatcgtccagcgacggcagcggtcgaaatcacggtagatcagcacgttttcccacgggatcagcacatgatccattaccagaatggcgtcgttctcgtcaaagcggctggagagcgggtagtcgtacggagagcctgtcgcccctgccaccatctcgtaagaggcgcgggagatcagcttcaccccttcggcatccatcggcgcgacgaacatcagcgcgaagtccgggttttcgcccatcacctgcgcagagccgaagccgatcatgttgtagtgggtcaatgccgagttggtggccaccactttcgcgccgctgacgatgatcccggcgtcggtctctttctccagcttgatgtaaacgtctttcacctcgtccgccggtttatggcgatcgatcggcgggttgacgatggcgtggttaaagtacaggccggtttcctgaatacgggtgtaccagttgcgggcattctgctcgaactgaccgtagaaggcagggttagcgccgagcgcgcagccgaacgcggctttgtagtccggcgtacgccccatccagccgtagctcaggcgcgaccactcggcgatggcgtcacgctgctggcgcagatcgtcggcacttttcgccaggcggaagaacttgtgggtatagccgccgctgccggtgtcggtgccccagcagagggtatcctgcatgtctggcttgtgcagggcatcgtacatctgggcgatggacgccgccgcattgcgaaatgccgggtgggtagtgacgtccttaacgcgctcgccgtagatataaatctcacggccatcttgcaggctttttaaatactcttcaccggttaacggacgtttggcatcagcgcggaaatcttcacgcttcatagggacctcgtatcggaagatggttgttaaatttatgttttgtttttgttgtttaattgaagcgtgagaggggcggaacgtgaagggacgattgggacaacggcaggtacttttcgcgagagatcgcagagtgtgatttccctcaccctaaccctctcccaaagggagaggggacggttactccctctccctttgggagagggcaggggtgaggggaacaggcgataccggtactttctgcgcccggtatgcgctgggtgagcaccccgtcagtcggttaaaaaaacgggcgaaataggccggatctttaaaccccagctgccaggcaatttcgctcactgtgctgtcggaaaacagcagcaaacgcctggcttcccgcagctggcggtcgaagatcagccgtttcggcgagcggttggcgaagcggcgacagatatcggtcaggcgagattcggtgagatgcaattcgcttgcatactccggcaccgtccagtgctcgtggtaatgagcatctgtcagctggttaaagcgctgaaaaagcttcagctcaccgcgcatgccgcctgacgcgtggtcgtcgagcttcgcgttgcgcagcagcagggtaaaaacggcctgggccagcaggaccagcgtatgctcgcgaccgggcagttgttccgtggattcccgggcaatcagctgccagtagtgcttcagcgccgccagctcgtcaggcctgtcggcaagcgacaggcagatccccggcaggccgaacgcttcccgcgtaccggggtagagcacttctaacagcggccagatgagatcctcgcgcaccgtcagcacgtggccgtcgctgtcggattcggtaataaacgcgtgcggcaccgacggtggcgttagcacgaacagcggcgcctgcaccgagtaacggtggtcgtcgagctggagctcaatctgcccggtgtcgagaaaatgcatctgaaaatactggtcgtggcggtgcgcctgcatgtcgcggccaaaaaaggccgccatgcgggcgaacgactggtagtgcacatcgtcggtgcccagactttcgtcgtaatccttgctgatatcaatgttggcgatggggctctggcacatgatcgttcctctgttgatcccgctgcgtcatcggaatgcgcgtcagcaccagcgcgcccaccaccagcagacccgccacgaaccacagtcccgagctgaagctgccggtcgcgtcgcgcaaaatacctatcagcaatgggctgacggcagacccgacgttgccgatggcgttgatcaccgccagcgccaccgcgcgggattgcaggctaataacctgatccggcgtggtccagaatatcgccatggcggtaaacgatccggttgaggccatgatgatgccaagcagctggatcaggctgtgatcggtcgccgaggccagcatccatcccgccgctgcaaaaagatacggcaggatggtgtgcttttttcgctctttcagcctgtcggagcggcggctccaccagatcatcccgaggatggtgcaaaactgcgggatcgccgccagcaggccaatcacgatattgctgctgccggtgttaaagctttgcaggatctgcggcgtccagatgttgatcgcgctcagcgtattcgtcaggcagaagtaggccagcgtgtagagcagcacggcgggcgtcagcacctcgcgcagcgtcgagcgcggcgtggcggcgtgcgcaatggccagctcctgctcgcgggcgatcatcgttttgagtgcctgcttttcgtcatcatccagccaggtggcctgatccggggtgtcgttaaggtagaaccaggtcaccacgccgagcaccaccgatggcagcccctccagcaggaacagccactgccagcccttcaggttccacagcccgtccatcgccagaatgtacccggagaggatcgagccgagcatcatggtcaccggcatggcgatcataaacagcgcgttggcgcgggcgcggtgatacgccgggaaccaccaggtgagatagaccagaatgcctggcaggaaaccggcttcggcaatgcccaccagcatgcgcaggacataaagcgtttcggggctggtggcgaacatggtgcaggtagaggcgatgccccacaccaccatgatcccggcgatccagcggcgggcgccgaccttcgccagcatgatgttgctggggataccgcacagcacgtaggtcacgtaaaacagcgtcgcggccaggccaaacatggttgacgtgaggcccagatctttgcccatcgtcagcccggcaaagccgatgttgatgcgatcgagaaacgagaaaacaaacaggataaaaagaaacacgatcaaacgacggaacagcttattaataacgcgatgttcaacagctttattatgcagggttgaggtcgtcatgttgcgctccacatcgtacgtttagtagacggatttattgttatcaactgctgtggtgacgtcggtaaagcgggccgccagcgcttcggcgctgcgggcgagcagggtggtatccacgccgaccgcgacaaacaacgcgccgaggctgagatagcgttttgccagctgttcattcgccatcaggatgccgggcgctttgcccgcgctgaggatctgcgcgatcgcctgttcaatggcggcctgcacctccgggtgctgcggattaccggcgaagcccatgtcggcgctcagatccgccgggccgataaacacgccgtccaccccttccacgtccaggatctgcggcaggtttttcagcgcctcgcgagtttcgatttgcaccagcacgcacatggcgtcgttagcctgatgcagatactccgggatgcggttccagcgcgacgcccgcgccagcgcgctgccgacgccgcgaatgccggcaggcggatagcgggtggcgctgaccgccagacgggcttcgtcggcgttttgcaccatcggcaccagcagggtttgcgcccccacgtccagcagctgcttgatctgcaccggatcgttccacgatgggcgcaccaccggctggctgggataaggggcgatggcctggagctgagtcaggacggtctgcacgctgttcggcgcgtgctccccgtcgatcagcagccagtcaaaaccggccccggccagtagctcagcgctgtagctgctggtcagccccagccacaggccgatttgtggctttccggctttcagcgcggtcttaaatgcgttttccatggtgcactcctacacaaagcggcagctaatcgagcccatgttgccgtagtcgacgtggaaggtgtcgcctctgctggcggcaaccgggcgggtaaacgagccgccgaggatgatctggcctggctcaagctgcacgtcgtatggcgccagtttgttcgccagccacgccacgccgtttgccgggtggttaagcacgcctgcggcgaccccggtctcttcgatcacaccgttgcggtagagcagggcggagatccagcgcagatccagctcgtcgggtttaatcgggcggccgccgaggatcacgcccgcgttggcggcgttatcggagatggtgtcgaacaccttgcgcgggcgctgggtttccgggtcaacgttatggcagcgggcgtcgatcagctccagggcggggatgacgtaatccgtggcgttgtagacgtcgaagatcgtgcagttcgggccgcgcagcggttttgccagcacgaaggccagctccacttcgatgcgcgggacgataaagcgatccacggggatgtcgctgccgtcgtggaagaacatatcgtccagcagcgcgccgtagtccggctcgctgatctgcgagctggcctgcatcgctttggaggtgaggccgatcttgtggcctttcagcacgcggccttcggcgattttcaggctcacccattcgcgctggacggcgtaggcgtcttcaatggtgatctccgggtactccagcgagatcgcgcggatctgctcccgggattgttccgcctgatgcaggcggtgggcgatcagggtatgggtgtgtttgtcgagcatggcgtatcctttgtgcggctgttgccgggtggcgcttcgcttacccggcctacggttcggtgctgctgttgccgggtggcgctgcgcttacccggcctacggtttggggccgttgtaggcccggtaagcgcagcgccaccgggcgagcaaacggctacttaaacaacgcgtgcacgttgttctgcttgtaattaagcgtcgggtgcagctcgtcgagctcgaacgacagcgccagatagcgggcggccatcagctctgcaaaatgcgttttgatcagcgcaaacagcatttcaccgacctctttccggctttccaggctgcgccccgcgccgatcttcagcgtcatatgcacaaaggcgtaatcgtgcttaccgtctgccatctgccaggtgtccagccagtgggcgcggctgcggataccgccgatggggaagatgcccgtggcggcgagcgcctcgttcactttggcgaacagccctggcaggtcggcctgctcgcggatgttgtcggtacattcagcaataaagtgcggcatggtggctccttacgcgggcagcgggaaaacggcgttgacctggccggtgccggagctggcgaacagctcggtgagaaactccaccttaccgtcgtatttgtcccagccgagcatccccagcagcatcaccgtgtcgtgcatattgccctcgccgtagcagtagtcggcgtactccggcagcatgctgcaaaactccttgaactgaccctcgcgccacagcttcaccacgcgctcgtccatctgacggtcaaactcgcgggtgtagctgttcatcccttcctccgcgcgctggtcgtcgataaagcggtgcgacagcgagccgctggcgagcaccgccacggtgccgtcatatttttcgatggcgctgacgatggcctcgcccagcctgcggctgtcggcgaaatcgtgaaccgtgcagaacgccgagatggagaccactttgaagtgcttatccgcgttcatgtagcgcatcggcaccagcgtgccgtactccagcttcaggctcgggatgttgtgcgccttggcgcgaacgccaagcttcaccgcttcgtcggcaatcagctggccgagttccgggttgccgtcgtagtcgtaggtcatgtcgcgaataaaatgcggcagctcgttgctggtgtagacgcccgaaaaatggtccgcgcagttgatgtgatacgcgctattcaccagccagtgggtgtcgaagacgataatggtgtccacgcccagctcgcggcagcgcttgctgatctctttatgcccgtcgatggccgactggcggcagccgtggtttttgcccggcagttcagagagatacattgacggaacgtgtgtgatttttgctgctaaggctaattttcccatgatcagatcccccactttggaatcggatgggcgcccatggagatacagacgttcttcatctccgcgaagacctcgaagctgtactcgccgccctcacgcccggtgccggaggccttcacgccgccaaacggctggcgcaggtcgcgcacgttctgggtgttgacgaacaccatgcccgcttcgatgctgcgcgccagacgcagcactttgctgacgtcctgggtccagatgtaagatgccaggccgtactccacgtcgttcgccaggcgcaggccttccgcttcatccttaaacggcagcaggcaggccactggcccgaagatctcctcctgcgccacgcgcatgcggttatcgacatccgccagcacggtcgggcgcaggaagttgccgcccttcaggtgcgcaggtagatcggtcggtttgtccgggccgcccgccagcagggttgccccctcttcaatgccgaggcggatatagccggagactttttcccagtgctgctggctgatgagcgcgccaatctgggtgttcggatcggtcgggtcgcccacgcgcaggcggttggcgcgctcggcaaagcgtttgacgaactccgggtagatgctctgctggatgaagatgcgcgagccggcggtgcagcgttcgccgttgatggagaaaatggtgaacagggcggcgtccagcgcgcgctcgatgtctgcgtcttcgaaaatcagcaccggcgatttgccgcccagctccatggaatacttcttcagcccggcgtttttcatgatgttgcgcccggtggcggtgccgccggtgaaggagacggcgcgcacgtcgtgatgacgcaccagcgcgtcgcccgccgtggcgccatagccctgcaccacgttgagcacgcccgccggaatgcccgcctccagcgccagctcgcccagacggtcagcggtcagcggggagagttcagacatcttcagcaccgcggtattccctaaggccaggcacggcgcgaccttccaggtggcggtcataaacggcacgttccacggcgacaccagcgcgcagacacccaccggctgcaccagggtgtagttgagcatcttgtcgtcgaccgggtaggttttgccgttcatctgctggcacacctcggcgaagaactcgaagttgtgcgaggcgcgcggaatgagcacgtttttggtctggtggatcggcaggccggtgtcggcggtttccatcgcggcaatgtccggcacgttctggtcaatcagatcccccaggcgacgcatcaggcgcgcgcgctccttcatcggcaggttggcccatttcggaaacgcctctttggcggcggcaacggcctgatggatttcggcttcgccgccggaggccacttctgccagcacctcgccggaggccgggttagtggtttggaagtactcacttccggcgacgtttttaccgttgatccagtggttaatctttttcattttgcagtctcctcactgacaattcggtttaccagacggcctacgccttccacttccaccaccacctcatcgcccggcaccacgtcggacagccccttcggcgtgccggtggcaatcatgtcgcccggttgcagggtcataaaatcgctcagatacgcaatcaagtaggggatgctgaagatcaggtctgccgtggtgccttcctgacgcagttcaccgttgacgtaggtgcgaagacgaaggttgtgcgggtcaggaatggcttcttttggcactacgttcgggctgattggggtcagcccgtcgcggcttttcacccgcaggttcgggcgatagtagttttcgagataatcgcggatggcgtagtcgttgcacaccgtgtagcccgcaacatactccatcgcctcggcttcactgaccttgcgcgcggttttgccgatgaccaccaccagctcggcttcgtaatgcatgtactcgatattgttcgggcgcaccgacgtctggttgtcgccgttaaaggtattcggcgctttgataaacaccagcggctcggtgggtggcttgaagtccagctcgctggcgtggtcggcatagttcagaccgagggcaaacagcgtggcgtgcggcggcgtgcgcgaagcgatggcaacgtcgcgttcctccaccaccgggttttccagcggcggaaatccttctgccagaatacgtacccgatcgcccgggcgaacttcgacgcggctttgcggagtgccgagcaatatcgcatcgccggggttcagggtggcaaattcgctcagggcgctcagcagttcggcggcgttgcggtgcagatcggccgtgttccagtggtccgcttcgcggccgttgatctcggtgatgatggtcagattatccacgttatcaacggcgacaggttcgccgagcgggcaaaatccatcccggcatttggccttgatcgccggacggtagaagctctcttccggcaggctgatttcgttagccagcgcgtagccggcgatgtacgccgccgcctcttcaacgcgtactttgctggcggttttgcccaccaccagcgccaccgtcgcgccgcttaacacggtttctccctgcgggaagggaatcggttcgcctgcgcggataacagtgttatgtggcttgataaaccacaccgccgtttttggcggcgcgttatagggggctttttcaaacgcctcagcccaggccacacgctggctttggtggtttagcgctacggcaaaaacagtacctttcattcccatactcctcaaaccggctgtccggttttgatttcattaatatgttaatgatctggttttatgcttttgctgttcgtttcgcaatcagaagtgaataatttgtgatgcaaataacaataaatttacataaaagggtgggttgatatttaaatcaataagttaaaaaaaatagctttgtttctgttagactttttgggttaaaacgtgttgtctataaaagcatctgtttttaattgtttatttgttaatgatgtaaggggtagatgatgcatgactcattaaccatcgcgctgttgcaggcgcgtgaagcggcgatgggctacttccgcccgatagtgaagcggcataatctgaccgagcagcagtggcgtatcgtccgcgtgctggccgagcatccctccatggattttcacgatctggcgttccgcacctgtatttttgcgcccaagcctgaccggcattctgacgcggatggagcgcgacggtctggtgctgcgcttaaaaccggtgactgaccagcgcaagctgtacgtgtcgctgacgaaagaaggcaacgcgctgtaccagcgtgctcaggctcaggtggaagaggcgtaccagcagatagaggcggaatatacgcctgagaagatgaagcagctcacggcgctgctggaagagtttattgaacttggaaaccgacatatcgccgcgagggacgaagcgtaaaaaccctaaattccaggatgattttcgtaaagttttctcatgccaggccgaatattctgtatctgcctgaggaaagagaaaacatgttaaaccgaatcaagattgtcaccagcttactgctggttttagcgatatttggccttttacaactcacgtctggtggtcttttcttcaatgccctgaagcatgacaaagagaatttcaccatcctgcaaaccattcgccagcaacaatccaccctgaacggtagctgggtggcgctgctgcaaacccgtaacaccctgaaccgcgcgggtatccgctatatgatggatcagaacaatatcggcagcggctcaaccgtcgccgagctgatgcagattgcctctgcgtctctgaaacaggcggaaaaaaactgggcggattacgaagcgctgccgcgcgacccgcgtcagagcgacgctgcggcactggaaatcaaacgtaattacgatatttaccatggcgcgctggctgagctgatccagctgctgggggcgggcaaaatcaatgagttcttcgaccagccgacccagagctatcaggatggctttgagaagcagtacgtcaactacctgcaacagaacgacgcgctgtatcagaccgcggttgaagacagcaacagctcttaccgccaggctatctgggtgctgattagcgtgctggctgcggtgctggtggtgattgttgccgtctggctgggtattcgtcaggcgctgatttcgccgctgaaccgtctgattgacagcattcgtcatatcgccagcggcgacctggtgaagcgcatcgacgtggaaggctccaacgagatgggtgtactggctgactccctgcgccatatgcagggcgagctggtgcgtaccgtgggtgacgtgcgtaacggcgccaacgccatttacagtggtgcgagcgaaatctcgatgggcaataacgatctctcatcccgtaccgaacagcaggctgcctctctggaagagaccgccgccagcatggaacagctgactgccaccgtgaagcagaacgccgagaacgcccgtcaggcgagcaacctggcgctgagcgcgtctgaaaccgcgcagaaaggcggcaaggtggtggataacgtggtgcagaccatgcgtgacatcgccggcagttcgcagaaaatcgccgatatcatcagcgtgatcgacggcattgccttccagaccaatattctggcgctgaacgcggcggtagaagcggcgcgtgcgggcgagcaggggcgtggttttgcggtggttgcaggtgaagtccgaaacctggcgcagcgcagcgcccaggcggctcgcgagatcaagagcctgattgaagactccgtggggcgcgtggaaattggttcaacgcttgttgaaagcgcgggtgaaaccatgggtgagatcgtgaatgcggtaacgcgcgtgacggatatcatgggcgaaatcgcgtctgcgtctgacgagcagagccgcggtatcgaccaggttgggctggcggtggctgagatggatcgcgtgacccagcagaacgcctcgctggtggaagagtctgcggcggcggccgcggcactggaagagcaggcgagccgtctgacgcaggccgttgcggtgttccgtattcagcaggaacagatgaaggcgcgcgagttcgcctcggcgaaaagcgttgccgcaccggtagtggcgcgtaaaccggcgaccgcagacgcgggcgataactgggaaacgttctgacgctgtgcgtttcgccgggtggcggctacgccttacccgggctgcggattgtgcgttttgccgggtggcggctgcgcctgacccggcctacggattgtgcgttttgccgggtggcggctgcgcctgacccggcctacggattgtgcgtttcgccgggtggcggctacgcctgacccggcctacggattgtgcgtttcgccgggtggcggctgcggaattgggttttgtaggcccggtaagcgcagcgccaccgggcgatcttacagaggcaggcgcatggcgcagcgggaaccatacgctaaaccgtgcgccgtctcttcctcgcgtttctggcgcagttctggcgtcagcgtcgtcatcatttcaaaccctaatcgcctgtagaagggcgcattccacgggacatcacgaaacgtcgttaacgtcagcgagttcagccccagactgcgggcatgcgcggcggcacgggcgattaactggcgtccaagacctcgtccctgccagtccaggtgaaccgacagttccacaataaacagcgacgatggatgagcttcggcgagaataaaacccacgggcctgtcgtcagccagcgccagccagcttaatccgcgtccggcgtaaccgaggtgatcttcaacagaaataacctcattgtctgccagccaggccagctcaggaacgtcgcgaaaccgctgccccgccgcgcgttcaatggcgggcagggcagcgacgttgtcgaggcgcgtcgggcgaagagtgaacgccgtcatcagccagcgctgctcacaattttaatctccaccatgccgatccccagcttgcgcggagcgtgaccgagaatattcccttcgttagtggactgcggatcgggtggcacaatgaccagcgtattgctgcgcgttgggttatcgaagtgcagcgtgctggtggtgacgtcattgctcagcgtcagcgtctgttcttcatcaccgacgcgcaccggtataggacggtttgcgttgggaccaaatgccctggcggtgatcaccagatcgaatttctccggtagaggatgggtatactcaattttcacctcatcgcccaactgcgcgttagaccagcgcccccaggattccggccgtgaaataccgctgaactgcttcacctcttccggcgcgccggcaacattaaagatgaagctgtctgctttataacgaatgtcgttgtcgacgattttcagcaggtctacgttgcgctgatagcgtgcggtatcaataaccgtatctttaaacgcggtttttccctgccactgcggtttgtcaacgtgttgcacggtctgctcgccgccgagttgcccctgagagacgcaccagtcggtggacagcgacagctgttgcgaccagagctggcccattttgtagcatttgtcgacccagacgaaattatcgcgcggggcaaattccgccagctggaagcgcagtggcgcggagtattcgctttccggcagcggctcgacgcggttatccgacacgcgcagcagcagcggcaggcggaaatggctgccggagaacgcgatcatttttttatcctgatcgatggtgaagtctttcatctctttcgggaagttccacagacgaatgatatccggcttccaggcgaggattttttccttcatgttgaggaagatttccgacagggactggcccgacagcgtactgcggcccaggccaatgaagttatcgccacccagaatatccagcacggtagcgccgttatccatcgagttacgtttagcggcaatgatctcctgctgcggtttatcgccgcgcagcacaaagaacaggttgctgcgatccagcttattcagttcatcccaggcgctgtttttcatcgccagatggtcagatgagacgacgatgaccgtatttttgaaatacggcgacgctttgattttctcgattaacgccgcgatatgctcctggctacaggtcacggcgctgaacgacttgttgtttttaccgtcaatgtcatagccctgacgtttacaggtgcgtgagacgaaaccatccggatgatgcgtgtcaacggtcaacgcaaacagcgagaagcgtttaccggcgcgggaaagctcctcgaatttcttccaggtttcatcaagaacggtatcgtcgtaaaagccccagtcgttgcggtaggccggatcggccaccgtggttttcagctcttcggaaccatacaggtgatcgaaaccgtgggatttcaggaacacatctttcccggcaaagcgcaggttagcgccctgcataaagtagttttcatagcccgagtttttcaggatatcgccgaggcaaatgttctgcgggaagaagctcgacatcgaggcggaggcgttgccttcaaacggggcaaacagcggaatgccgcactgggaggccaccatccctgcgatggtgtaatccgtgccagggagctgcatggtgtggctgaagtcgaggccctggtttttcagtgcgccaagctctggcgtcaggttcgggaaagcatcgttatcaaaataggtgcgttccagactttcgccgtagatatagaccaggttgagtctgggattgtcgatcttcttcgagggttctttgtaataggccgcaaagtccggatcgccatcgcgcgactgggattttaccagctcggtaatttgatggaatgccgggctggcatccacggaggccagcgccaggcacagcgccagcaggctgtagccatgatgatgcggacggtgacggcgacggcgcagaacccaggccagcgcggcgaagatgcccaccagggcgaccaccagccccagacccggaaggatgtacttacccacaccagcgccggtcaggctgttggtcaacgtgtagagcaccgcgtcgttaataccgtcgccggtaaagtaatcgctggcatataacgtaatgtttaaaacaataaaaatgccgagcaccaccagggtggccacaaaccaccaggtgtgacgaccggctttccaggcataaacgccgatggaagccaggaaaaggacaagggacattaactctgacaacagcagatcctcatcatgccggacgattagccggctaattgcttattttttgggtaatacaatgtaattgcgatgtcgcttagctgcaattttagtgtcacgaaagtgtgctgttgttaggatttggtttataaaatcggatttttgaatacagtcgcatcgtggcacacggaggctgaggtggtggcagggggtaaaaaaacgcacttcacgccgcggtgtaagactaacgtaataaacccggcgtgttgtggcagaaaatgggaggcgatcaggagaggaaattaacgccttgtttcagcaccagatcgcaggctttcgttttcacctgtttcgccagagatgaatttccaagggtgctgaggttcagctgctggccattttgcgcgttcagcagaccctgaataccgtccatatagttggtgtccgctttctgctcctgggtgtccagacccagtttaccaagcacctggtttttgatgttttcggtatcggtaacggaagccagtttctgcttcgcgcagtattccagaatgcccgccgcgttgttcatcgttccggcgctcaggctttgggagctgttactcagcaggccggtgagggacgaggctgacagcccgccctgggaagtgccgctctctttggttaactcacttgctgcgctggagagcgactcctgccatgatgcggcctgcgctgcgccagtcaccagcagggcgccagtaaggatgctgataagaaactgttttttcataatgatttactcaacaaggtccgttttgggccaaaagtgggttcagtatatacctctgctcttccggtgctccctggaaatatcttaatactctttgccggtgacgcggctgcgatagctgtcccagtcgaagatgacgtacaggctgttacccagcttcatgcgatccatcacccgctcgccaagaagtcgggtcatctcgtcgatattgtggttcgtcagcataccggtcgggcgttttgacgacgaacggcgatcgacaatctgattgatgatcactttttcgtagcgggactccgtctggacgccgatctcgtcgatgaccagcaaatccacgttactcaaatcattcagcagctgttcttcgctggtttcgcggttactgaaggtgtccttcatggcggacataatatcggccacggtgataatcagcactgacttcccgcgcagcagcagctcgttgcagatagcggccgcaaggtgatttttccccgtgccgggttttccgctaaagatgaagctggcaatgttgccgtcaaattcatccacgtactggcgcgcctggttgagggcgttcatctgcccctgtgactcgaccttataattctcgaaggaacagttctggtgcagagggcgaatgcccgagcggttaaaggtgcgctgcattttcatcgcgcggttttcgcgggcgagggcagccgcgcgaattttaccttgctctttttgccatgccagcagctcttcaccggtggtgaaggcgggcttcacgttggcgggcatcatcttctgcaaacgtttcatcaggtcgccgacgtttttcatttcgcacctcggaatccatcagggatttttttgtccggttctgaaaaggcattgatatcacgttttggctggccattgttgctggcgcggttgatttgcagactgcgcgcgaacttttgctgccactgaacatggtggaagacttttccttcagcctgccagtaagcggtaaaggccgccagctcttctggcgtcgcgggctgcgcgagggctattccccataaggccgcctgccgctgaaaatcggcgtccggctgccaaccggcgtacatgggaaatttccccattggaacggccaccggggcgctggcgggttcgtcaaaaaactgattatccagcatgacatcgctcgccggacgcgacagcttcgcttcaatttccagaagctgcgccagacgttccggcgtgaccgcataaaacgccggggcgttgtcggcaaataccgcgagcgtgccgccttcggcgtgcgtcaacacaccgcgaggatcgcgcataaaggcatcaatgccagcaatgctggtagtcaggattctggaggacataacactttctcaactgattactacggacgtgattgagggttatggtagcacagagagagggggaggaaaggagaggatttccccggcggcgttacgcttaccggggctaaaatcacaggcggcagtttacgcgatgatgttcagcgtcacgtcgatattgccgcgcgtcgcgttagagtacggacagacgatatgcgctgcatccaccagttttttggcttccgctgcgtccatcccttcaacgtggatgttcagcttcgcttcgataccaaaaccggttggcagcgggccaatccccacttcgccttcaataaaggcgtcttttggcagagcgaatttgtcgcgtgccgcaacgaacttcattgcgcccaggaagcaggcggagtagcccgcagcgaacagctgttcagggttggttacttcaccccccatgccgcccatctcttttggcacacccagtttgacatccagaacgccatcggaagacgttgcgcggccatcacggcctccggttgctttggctttggcagtgtagacaactttttctaaagacatggcaggttcctcatcttacgtttatatgcactattaaatagcgcgcgatgtattaagttagaatcagacgcgtaaagtatagccttacgcgcgatgaagctgttggcgcaaaagttcgagctgttgcttgagcgccagcatggtgtcggtatcacactgcgctgcacagcccacggcgtggggtatcgtcacggcctgctgttgcagcgcccgacccgcgtcgctcagggtgacggcgacctgacgctcatcctgacgggaacgctggcggaagattaatcctgcgctttccaggcgtttcagcaggggagtcagcgtggcggaatccaggaacagccgctcgccaatgtctgacaccgtgatatcatcctgctcccacagcaccagcatcacaaggtattgcgggtaggtcaggttaagcggcgccagcagttgccggtacagcttgttaagcgccagatttgccgaatagagggcaaaacagagctggttatccagcagaagcgcgttggtagtgtcgttcgtttttgcgtccatgaaatgaatatagatagcgcacgatacaattgcaagcgattttattatacgcgtggacgtttgcggtaaagccataatccggggatcgacaggccgatggagagcgcgcccacaatcgacgaggctttaaggaaattgctcagaagcaggatcatctgcggttcgctgtagccaaagtggctgattttgacggcggagatcatcgccgtataggctgaaatgcccgggaacataggaatgactgccgccacggtgaacactttcgggtgcgccagataccagcgggaccactgaataccgatgctgccgaccagcatggaggcgataaacgtcgaccattcgatattaaagcccgaggtcatcatgatcatacgtgagccgtggccaatggcacccagcagcgcacaccagggtaatgcacgctgtgggacgttaaacaccatcgcaaagccaacggcgggaagggctgccaggagcatgtcctgcgccagtgcgagtagaaaatccatcacgcccatccgcgtaacccccagagtgtcatggccattaccaccccgatacaggtcgccagcgtcagcaggctggctatcgcccagcgcgccagaccggtgttgatgtggcctttgaacatatcagcgacggcgttgattaagggaaaacccggcaccagcagcaatacgctggcggccatcgcaacagtaggcgtgctggcgaagtaaggctggcgcaaaagcaggccggatacggttgtcgccacgaacgccgtgatgcagaagttaatttgcggatgcagttgcctgtgcgtcaacaactggcggacatacatcgcgatgctgctggcaaagaaggtcacgacagcgccgtcccagccgcccgcgttgagcttgcagaagcaggcgcaggagagtcccaccatcagcacaaccagccagcgtggataccggagaggtttgatctggttgaagcgtttctctatctccctcagatcgagcagcttgtgttcagcaaggatcacgatgtgctgcacttccgtcacgacgtgcatgttaatgccgcggtcatgatttttacgggtggaggtcaggcactgtccgtctttaatggtggtcagcacaatggcatttgacgagatggagctctcaacgctgtccatccccagcgccagcccaaggcgtgtggaaagttcttccacgagggcgctttctgccccgtgttgtaagagaaaaagcccgcactgaatacatagccgcgtggtagcacgttgcgtagaccgatctgcctgcatgaaacgccctgaagagaagagagattgcttacttttaacacaaagggccgggccctttgcgctgggccagatcaacatttgtgcaatcagtcgcgtgagtagggggagaaaaccgcactttctatttatttaatgaatataaaaatagagatttataaagacaatatattaagtatttctaatttcatattttcaatcttttcacgcaatcttaattaaagttttgtggtctttatgcgatattaagccagtattgggcgtttcttaacccatgtgacatttcttctgatttgcgagtattaagccgttttgtactgagggatgcaagcgtgtttaaactcgtagggttagttcgttcttaaataatgaattcatgacagggagggtctatgttgccattgaatggtaaacacggagtggtgattagtagagtgccggttatgcaaaatgggctaggtggcgtcatgacgcgtcattttcctgattttgaaataacgtactgccgttcgatgcaggagttgacgctactacaattgcgtcgcgctggggtcgttattgccgatatttcaggtgagtatcgtaatcctcgcggcacgcttgagcagtattatggattaatgaatcagtatcgggacattcactggatattccttgtctcgcgtcccctttatccacttgcagtagagcttcttatgcgtccggaaagcacgctgctttcggatatggaaccgatcgaaggcgttattaacgctattcgcgcgggcagtgaacgtgccgagcgaataagccagacgttattaataccggaaacgtccgatattgaagaagagagtgagcaaatgattgcgctcacccactctgaacgcaaggtgttgcgtttattaggtaaaggttggggaatcaaccaaatagccacgctgctgaataaaagtaataaaacgatcagtgcacagaaaaacagtgcaatgcgccgcttatcacttcgcagtaatgccgatatgtacgcgtggataagcagtacccagggaatgcgagaactcagtttaatgtcggcttatggagagtttgaggaatggaaaagaccactgcaacaagacatatcgccgtcatcgaaagctgctcaatgagcgctgtagggctgaagcatctctttgcgatgcccgccctgagccattaccaggtgcacctgtttagcagattcgccagctttaaagcggcgctcgtggatatctcattctatgcggttatctattcactgtctgatgagcgtgaagagcggagaaactgtctggcctgtttacgggatcttaccttcacccacagcgacgtccagcgtatcgtgctggcctctgacgaaatggaggcgaggctggtcagccatctttcgccttctcgcttgcatgggataatcagtaaatcggttccgctaaagcagctaatggaggggctggagacattactcagcgaaacgcatcaggtgaatgacaacatgtacaatcactggtgtgttagccagaatcgtatgttaagcccaaccgaaagggcaatactgcgttatatgtcatcgggattttcaatccctgaaattgcggcgcagcttgaacgcaatattaaaaccatccgggcgcataagtttaacgcaatggtaaagctgggcgtcaattctgacgtgggattactggatgcggcggatatcctggcgcatctccctgcccgggaagtgcgtcgttcagctctcaccgttccttcattctctcagcgttaagtggtgcgccagagttcttctggcgcaacgtttaaatgcagacatcgacccattttgctgcggtcagctccgccattctgtcgggcgatatacgcaccgcactgtggatggcacccgctgcgggtaacacttccgcgtactgttttaatgtgatgtcacagtaaacagagagcggattttccagtccgaaagggcagacgccgccaacaggatgacccgtcagggtgactacctcatcgctgctgagcatgcgggcttttgcgccgaatgtctctttaagctttttgttatccagacgcgcatcgccttttgcaaccaccagaatcacgtcatttttaattttcagtgacagcgttttggcaatttggccgggttcaacgttgtgcgcggcagcagcaagggcaacagtcgctgtgctttggttaagctcaatgatctctatatccggagcgtgttcggcaaaaaactgttgtacagactgcaaactcattgattcctcctgacaaatatcctgcgtaatctgtcataagaatttagtcgctgtaaatatcccttaagtaacaaatatccgtcagggtcgatttctggatcgccttcacattcacagaaaccggttacagtaaccggttgcagagcgtgatgcagagattaatactaagtgtgtaacttcccctgtatctaataataagagctaattatgaaaccattccgtttgagcagtaccgcaggtacacgatccggcaaggttgtgacgctgatgtatggaacaacgtgtgacgtgagagcgtccaaaacgaacgtctgacaggagatctgctatgtctgccaaccacgctgcatttaatctgattttccgcttcgttgaaaattatgtcagccctattgccgggcgcatctcttcccagcgtcacgttatggctattcgtgacgggtttatctcagcgatgccgtttatgattgtaggctcgtttttattagtgttcgcttacccgcctttttcgcctgataccacctggggttttgctcgcgcctggctggatatggcgaagcagtttgaaggtcaaattctgacgccgtttgatatgacaatgggggtgatgtccctttatatctgtgcggctattgcctacaacctgggcaaacattacgttaaaacccatcagctggatccgttcatgtgcgcgatgctgtcgctgatggcgttcctgctggtcgccgcccctaaaaccaaaggcgctttaccggtggatagcctgggagggaccggtattttcaccgcgattctggtggcgatctattgcgttgagatgatgcgtttcctgaaagcacacaatatcggtatccgcctgccagaccaggtaccgccgatgatcaaaaactcgtttgacctgctgatcccggtgctggtggtggtgctcacgctctacccgctgagcctgctgatccagtcgcagttcggtatgctgatcccacaggccatcatgtcgatattcaaaccgctggtctctgcggctgactcgctgcctgcgatcctgctggcggtgctgattggccacctgctgtggtttgccgggatccacggcgcggcgattgtctccgggatgctgcaaatgttctggctgacaaacctgggggcgaaccagaccgcgctggcggcgagccagcctttgccacacatctttatggaagccttctggacgttctttatcgttatcggcggatcgggggcgacgatggggctggtgttctgctatctgcgtagccgctccgcgcacctgcgctccattggacgtctgagcgtggtaccaagcattttcaatatcaatgaaccggtgattttcggtacgccgattgtgatgaacccggtgttctttattcctttcctgctggcgccgatggttaatgccgtgctggcatgggcagcgatgaagtttgatctgattggccgcgtgatttccgttgtgccgtggacggcaccggctccggttggtgccgcctgggcgctgggctgggatttccgtgcagccattctggtgctggttttggcctgcgtttccgccattatctatttcccgttcttcaaggtgtacgagaaacagttgcttcagcaggaagcggaagaagcacagcgtaatggagaagaggaaaatcagcaggtcgcttaggtaaaagcaaaacggcaacgcaggttgccgtttttaatgtttgttccctctctctgcgggtttcaggccgggccagactacttaagcgtgcaatcgccacactgctgcacgtccggcagacggtagcgctgacagcaggtacgacgtaccagaagtccctcacgcggaaccacggtgcggtaaagagggttgtcccgtccatccgacagctgtctggcaaagaaacagctctgacgcagtgcatccactttctcgtcgccgagcagcggcttcatctccgttaaataccagtggataagatacccggtattactccagatcagtttgccgttaatctctcccgtcgcttccagcgcatcaatgaccggaaccagcgctcttgtaatcagccgttccatacgcgcctgcgctgacaggtgtctcgcgctcggatcttcatgtacatcaatccagaaacaggcagcacgcccggtttcatgaaactcaacatggaaatgttccgacgagagatcgagcatcgtttcctgggtcaacagggccagcatgacaggcggcaccatcagcccgatataccactgtgcccagagggataacagcggtttgttttcccgcgtcagggtaggttggttacgataaatatggtcggaataggttgccagcagtgaccgcagctccgcagggcgttgccactcagtcagcgtcagagcatgatgcggcggtgcttcatccagtttgatgaaatccagcagatgggcgcgcgttacggcaattttttcccgaatggcatccgcaagcgtcgtttccccggcggagagtggagctcgccagagcaggggctcaacgatgtgtgcggtacgagtcgccatagtgtggattacaaatctaaatgataatgattgccaatcctaactatagataaaaccgagcgcaagcgttttatcctggcgctgtgaaggcggtttcaggcggtatgaagctcttcgctcagcagaatgctgttacgtcccatatgcttggcttcatagagggctttatcggctttcgccagcgcgccctcaacgtcgtcaccttcgaacatggcgatgccgatgctgatggtcacgttagtggcgacgctttcgttaaacatatgggggattttaagatcgtaaaccttctgacgtatgcgttcagccgtctgtcgcgcttgctccagcgggatgttactcaacagcaccataaattcttccccgccaaaccgggcgacaacatcgcgtgagcgcacggcgtcgcgtatcgcagccgagaccctgatcaaggcctgatcgcccatcatatggccataatggtcgttgtaggctttgaagtggtcgatatccatcagcagcacgaagtgctcgccagcgtcaggcctgggaagattctccagccggctttgcagcccgcgacggttatataggccggtgagcgggtccatcatgctgagatcggtcagggtttcgcgctcctccagcagttcggaaagcagctcctgggcgaaacggtcattgcgccgctgaagaacatgatggataccaatggcgaccaccggcagcgcgaaaaaataggccattctcagccagttttcggacgggctaagccacaggcaggatataaaagcgggaaatgaatgtaacgtaaaggctttaatattactcgcgaacgccagagaccctataaaaagcactgttaatagcgccatcattaaataggtcgcgtgatcgtgcgtgattaacagaaatttagagacgatctgccaggcccataaaagaccaaaaatagctgaaacaacagggatatttatttttcgcgtgctgtttttccagtgccagataagtaagcctgtgctgatagtcagtacggcaaagagcgggactgataacacacgcacggaatagagagggtttgttaccgagaacaatgctgacgcggcgttcagaaataaaaacaaacgtaaagatagctgatatttcttgttgactaaagacagccaggattgtgatgtcatatgcgtgcgtttttattaaaactcaattaaaacaatgagcaaggtgctgttgtgtaatattgggcgctacaaaattgaatttttattatcagaaaaactttatcggaagttaacaggtgggcaatttatcaccttacacattctctgtcattatgggaaagcaattgctggcgcaatttcttacgtcgtatgctgacaagtgataattactatcatatgatactggttatcattatcagtgcgagaggtgaaaccatgttgagcaaagcgctgggaagtgggtggggaatattactgcctggttccattatcggtgggctaatgtttgccgatctccccattgatgtctggaaagcaatgattgtttcaggcttgctggtgacatccgcgatgatctggcacaaacagttacggcattacgtgctgctgccatcatgcgttgcgctaatcagtggactgctggtgattctgatgagtttgaaataaaagggaaaaacaggaggcactgctgaggggatgtaagataattggtgcgaggggggggacttgaacccccacgtccgtaaggacactaacacctgaagctagcgcgtctaccaattccgccaccttcgcacagtcatcttactggtttgatatcgcctcgttggtgcaggggggggactcgaacccccacatcctaaggacactaacacctgaagctagcgcgtctaccaattccgccaccttcgcccagtgcgagcaatatcaacgtgatttatggtgcgaggggggggacttgaacccccacgtccgtaaggacactaacacctgaagctagcgcgtctaccaattccgccaccttcgcataccatcgacactgtaaaagtatcgtaaccacggaggcgcattctagatgttttcagctttacgtcaacagaaaattgcgcacgttgttttgattgctgcaaaaatgggcgatggcagcgtcagccatcgccggaccggggggttactttttcgcctggcgcgtcatcacggtgcgatagaccttaaagcggcccgtctgggcgatcacttcgtggaagccaaaggtttcatccagcactttcgggtacgcgaggaaggcgttcgctacgatacgcagctcaccgccgctgttgaggtgacgggttgcgccacggatcagcgtttgcgccgcttcaaggctggtctccattccgtcgtggaacggcgggttagagatgatcatgtcaaagcgaccggtcacgtcggagaagacgttgctggcaaacacgtcaccttctatgccattcgcagcaagcgtggcgcggctggcttctactgccggggcgctcacgtcacacagggttaaacgcacttttggtgagtggctggcgagaaccgttgacagcacgcccgcgccacagccgacgtccagcaccttgcccttggtgtgaggcgtcagggtggacagcagcagcttgctgcccgtatcgagcgcatcacggctgaacacgcccggcagggttttaatggtcaggccgtcaagctggtactcgtcccagaaggcgtcggcatcgaaggtggtctgtttttccagacgaccatggtacagtccgcagcgacgggcgctgtcgattttcgtcagcggcgcccaggcttcgagcatctgctctgcgctacgcaccccgctgcggttctcaccgacaacaaaaatatcgcagccgaccggcagcagagaaagcaggttcatcagctggaactgggcttccggcttgtttttcggccagtagtaaatgagcgtatcgcagtcagcaatatcgctctgctccgccgccaggctaaagcgcgcgcgctcgcccatctggcggctcagcacctgccagtggtgatagtactgggtgtgggcacggctttcagcacagtcgaaacgcgcgggcaggtcatcctgcatatctccggcaaacagaatacggctttcttcgaaatcatcactgtgacgcagcaagacttcacttgccggggtaaatgcagacatgaattgttcctcaataaactcaggcggggattatagtaggtagatggcgcagtttcgacacatttgctatatttgcgcgcctgagagacaggagttttcgctatgatatcccgacgagactggcagttgcagcagctgggcattacccagtgggctttgcgtcgcccgacggcgttgcggggcgaaatagccatctccatacctgcgcatgtccgcctggtgatggtggcagaagcgccgcctgccctgaacgagcccctgattgaggatgtccttcgcaccctgaaggtgacccgcgatcaggtattacagctggcgcctgaaagcgtcgcgatgcttccccctgacagccgctgtaacagctggcgaatcggggcggtggacgagctacctcttgaaggaagccagatcagttcgccagcgctggacgaactgaaagccaacccaaaagcgcgtagcgcgctatggcaacaaatttgcgaatatgaacacgatttcttccctcacgacggctgacctgaccaccgcgttcgcgattgaaacccgcgcccatgcctttccgtggagcgaaaagacgtttgccagcaatcagggcgaacgctatttaaatctccgcctggacgttgacggtgcgatggctgcgttcgccatcacgcaggtcgttctggacgaggcgacgctgtttaatattgcggtcgatcccgcttaccagcgccgcgggctgggcagggaactgcttgagcacctcattcgtgagctggaaacccgtgacgttttcaccctgtggctggaggtgcgcgcgtccaatgtcgccgccatcgcgctctatgaaagcttaggcttcaacgaggcgactatccgccgtaactactaccccaccgcagagggacgtgaagacgccattatcatggctctgccgattggataacgaaaataaggttgtaacgatgaaatgggactggattttctttgatgccgacgaaacgctgtttacgtttgactcgttcggcggcctacagcggatgtttctcgactatagcgtgacgttcaccgcggaagattttcaggactatcaggcggtgaacaaaccgctgtgggtggattaccagaacggagccatcaccgcgttacagcttcagcatcagcgttttgacgtgtgggctgaacggttaaacgtcagtcctggggcgctgaacgaggccttcctgaatgcgatggcggatatctgcgcgccgctgcccggcgccgtttctctgctggattcgctgaaagggaaggtgaagcttgggatcattaccaacggctttaccgcgcttcagcagatccgccttgaacgcaccggcctgcgcgatcatttcgacgcgctggtgatctccgaagaggtgggcgtaccgaagccggatccgcgtattttcgattatgcgctggcgcaagcgggcaatcctgaccgcgatcgcgtgctgatggtgggggatacggcagaatctgatattctgggaggtatgagatcgggcctgtcgaccgtctggctgaatgcgcatggtcgcacgctgccggaaggcatcgagccgacctggaccgttacgtcattgaacgaactggagcagctcctgtgtaaacaatgattgcctgccccctgttgatgggtaaaatagccgcatttttcgtattccatgatgcgcggcctgctgccgcgcttacctaagaagaattgattatgacgttgtctccttatctgcaagaggtggccaaacgccgcacttttgccattatctcgcacccggatgccggtaaaacgaccatcaccgagaaggtgttgctgttcggacaggcgatccagaccgcgggtaccgttaaaggccgtggctccagccagcatgctaaatccgactggatggagatggaaaagcagcgtggtatttcgattaccacctccgtgatgcagttcccgtatcacgactgcctggtgaacctgctggacaccccggggcacgaagacttctccgaagatacctaccgtacgctgacggcggtggactgctgcctgatggtgatcgacgccgcgaaaggtgttgaagatcgtacccgcaagctgatggaagtcacccgtctgcgcgatacgccgatcctcacctttatgaacaaactcgaccgtgacatccgtgatccgatggagctgatggatgaagtggaaaacgagctgaagattgcctgcgcgccaatcacctggccgattggctgcggcaagctgttcaaaggggtttaccacctctataaagacgaaacctacctgtaccagaccggtaagggccacaccattcaggaagtccgcattgtgaaaggtctggacaatcccgagctggacgccgctgtcggtgaagagctggccgcccagctgcgcgatgagctggagctggttaaaggcgcgtcgcacgagttcgacagagagctgttcctgagcggtgaaattaccccggtcttcttcggtaccgcactcggcaacttcggcgttgaccatatgctcgacggtctggtggagtgggccccgcagccgatgccgcgtaaaaccgacacccgcgaagtagaagcgaaggaagagaagttctccggcttcgtctttaaaattcaggccaacatggatccgaaacaccgtgaccgcgtcgcctttatgcgcgtggtttccggtaagtacgaaaagggcatgaagctgcgtcaggtccgtatcggtaaagacgtggtgatctccgacgcgctgaccttcatggcgggcgaccgttcgcatgtagaagaagcctatccgggtgacatcattggtttacacaaccacggtaccattcagattggtgataccttcacgcagggcgaaatgatgaagttcaccggtatcccgaacttcgcgccagaactgttccgccgcattcgcctgcgcgatccgctgaagcagaagcagctgctgaaaggcctggtccagctttccgaagagggcgcggtacaggtgttccgcccaatcgccaacaacgatctgatcgtgggcgcggtgggtgtgctccagttcgacgtggtggttgcccgtcttaagagcgagtacaacgtggaagcgatttacgaatcggtgaacgtggcgaccgcccgctgggttgaatgttcagacgtgaagaaattcgaagaatttaaacgtaagaacgaagttcagctggcgctggacggtggcgataacctgacctatatcgccccaaccatggtaaacctgaacctgacgcaggaacgttatcctgatgttcagttccgcaaaacgcgcgagcattaatttcctttcagagcacggcagccgccgtgctcttctttaattcctgtgatattaaacccttgcggaatgttcttaattcaccgcaatttttcgctattcgttcgttttttccccaattctgaatgcacccctctgattgtgatctatatttaactcagtgtttagcaccgggcgtggatgaattaactgttcaatgcatgtccattggttctccattttgccccggtgttaattcgcaatatataaaaccaagattagggaagtatgtcgcccaaataatgggcaaaacacaggaataaatcgatgaatatgacaagactgaagatttctaaaactctgctggctgtaacattgggtagtgtcctggtaagcggttctgctctggcggaaaccagcaccatggataaagcgcaaaattccgccaataccgcaggggaaaaaatcgatagctctatgaataaagtcggtaatttcatggatgacagctcaatcacagcaaaagtgaaagccgcactggtggatcacgaatccatcaagagcaccgatatttctgttaaaaccgacaacaaggttgtcaccctgagcggtttcgttgaaagccagacccaggccgaagaagccgttaaagtggcgaaaggcgttgagggcgtaagctccgtcagcgacaaactgcacgtacgtgacagcaaagaatcgtcggtgaagggctatgccggagatgcagcaactaccagcgaaatcaaagctaaactgttagctgacgacatcgtgccatcccgtatggtgaaagttgaaaccaccgatggtgtggtccagctgtccggtacggttgagaatcaggcacaaagcgatcgtgccgagtcaattgcgaaagctattgatggtgtgaaaagcgtcaaaaacgatctgaaaacgaagtaaagcagtaccattcgcccgtcaggctgaaaaccgcgggcgaaataaaaacgattctggaaaagccggtgagtgacctgagcgctcacgtttagcggccgacattaactatggtaaaggagaggcttatgtttcgttggggcattatatttctggttatcgcgttaattgccgccgcattgggctttggtggactggcgggtaccgcggcatgggcagcgaaaattgtcttcgtcgtcggtattattctgttcctggtcagcctgtttacgggtcgacgtcgcccgtagcaaacgcaatatttactaaacaaactcaagccagtcctcgtgactggctttttctcgtttgagaaccaccggggaagtgcgttactgtgtctcatcaaaataatgaaaacaggaaggcagaggtggggcaacgaattcccgttacgctcggcaatattgcgccgctgacgttaaaaccgtttcatgcaggccagcttgcgctggtctgtgaagggggagggcagcgcggtatctttaccgccggcgtgcttgacgaatttatgcgcgcacaattcaacccgttcgatctctatttcggcacctctgccggggcgcagaacctctccgcctatgtctgcaaccagcccggctatgcgcgcaaagtgattatgcgctacaccacctccaaagaattcttcaatccggtacgcttcgtacgcggcgggaacctgatcgatctcgactggttactggatgccacctccagccagatgccgctggccatggataccgcgtcacgtctgttcgataccggcaaagagttctggatgtgcgccagccgtggcgatgactattcgccgggttacttttcgccgcagaaagagaactggctggatatcatccgcgcgtccagcgcgatcccgggattctaccgcaccggcgccctgctggaggggataagctatcttgacggcggtatcagcgacgcggtgccggtacaggaggcggcgcggcgcggggcaaaaaccattgtggtgatccgcacggtgccttcgcagatgtattacaccccacagtggtttaagcggatggaacgctggctgggcgacagcagcctgcaaccgctggtgaatatcgcgaagcagcatgaaaccacctacggcgcgatgcagcgttttattgaaaaaccaccgggcaagctgcgcatctttgaaatttatccgcctaaaccgctgttgagcatggcgctgggcagtcggctgcctgcgttgcgtatggattacaaaacggggcggctgtgcgggcgttacttcctggcgaccgtcgggaaaatgctggcggagcaaccgcctcttcatcggcataaaagcatcattttgccgcctgccgttgtggccaatgacgcggtggcgatgccgctggtggacgcgccgcaggccaacgatggcttactcgataacgaggatctggcgtgacgcactgctttatcgatacccattgccactttgatttcccgccgtttagcggggaggaaacatcaagtattgcgcgcgcggctcaggccggtgtgagagccattattgtgcccgctattgaagcggcgagattcgacaaagttctggcgcttgcccgggagcacgatgcgctgtatgccgcgctgggtctgcatccgatcgttattgagcaccatcttgatgaccatctcgacaggctggatgccacgctgcaaaatgcggatacgaagctggttgccatcggtgagatcggcctcgatctctatcgtgaagatccgcagtttgagcgccagcagacgatcctggatgcgcagctccggctggcaaagcgccacgatctgccggtgatcctccactccagacgtacccatgacaaactggcgatgcacctgaagcgtatcgacgtgccgcgcaggggcgtggtccatggtttcgctggaagccttcagcaggcgcagcgttttattgagctgggctataagattggcgtcggtggcaccatgacctatccgcgtgccagcaaaacccgtgatgtgatggcgcagctcccgctgacctcgctcctgctggaaacggatgcgcctgacatgccgctgaatggttttcagggccagcccaaccgcccggagcaggcggcgcgcgtttttgatgtgctgtgtgagctgcgtcaggagcctgaagatgtgattgccagcgcgctgctggaaaacacccgcgcggtcttcggcatcacgctataaataaagggccgggcggatcaccgtgatctgctgccgttccagggcctgcgccagcggctcgatgtcctccggcgtggcgctccgccatcgcgccgcctccccgtaaaccccatgagcatgaaacgcgttgatccgcacaggaacgttccccaacgcgtggataaaagcggtcagcgatggcagatggtgcagataatcacaccgagcggggctcaccagcaggcgcagctccgtcaggcgatgacgatcggccagccagcggatgctctgcttgatctgcgtgttttcgcgcccggtcagaaaacggtgatgttcattgccccaggctttcagatccaccatcgcgccgtcaaacaccggtaacagcttttgccagccggtttcgcttaacagaccgttgctgtccaccaggcacgtcagatggcgcagggacggatcggctttcatcgcggtgaacagcgcaaccacaaacggcagttgcgtggtggcctcacccccgctgacggtcacgccctcaataaacggcgcggacgtgcgaatccgtgagaggatctcctcgacgctatagcgctgcgccatcggcgtcgcctgctgctgacacaggtgcagacaggtgtcgcactgctgacagtgactctcctgccaccagacgcgcccggcctgaattgccagcgcatcatgaggacagtggggaacacagtcgccgcagtcgttgcagcgccctatcgtccacgggttgtggcaggttttgcagcgcaggttacagccctggaggaacaacgccaggcggctgcccggcccgtccacgcaggagaagggtatgacctgactaactaaagcgcatctgctgttcatggcttatcacgcgcggctgacgttccagaatacgggtattgcgcgcggcctcctcgccgagccaggtggtgttggtgcgcgagccggcctcccggtatttctccagatcggagagccgcaccatatacccggtgacgcgcaccaggtcgtttccggctacattcgcggtgaactcacgcataccggcgttgaacgcccccaggcacagctgcaccacagcctgaggattgcgtttaaccgtttcctccagggtgagaatatcgctgatccccgaatgatagtgtttatggtgcggcgccacggccagcaggtggctgactgggtccggttcgtcgccgtacggcagacgcgcgcccggcgtggtgccagaatcggaactaatcccagactgggcatgctgcatcgcgcggtgctgccagccgtgtttcaccggcgtgttttcaacaaacgccgcaagctgttcactgatgcggtagcccagcgcattggcctgttcgttcttaccgtaacgtcccgtaatgcctgatttctcgcacagcacattcaccgcttcggccagaccgtacatgccaaacatcggcacaaagcgatcggcatcaatcagcccctctttcaccaggaagctattctcaaagaaaccggattgttcatatagaaaatcgcagcgcgcattgatgatcgcgatttgttgctggcagtagtggggaagggtacgggtgaaaaagtcttccggtgagcggctgtgttccgcgatcgctttcaggttaaggcgcaccagcgtgctgccgccgcccgccagcggcagggagttgtaacagctcaccacgccatagcgaccttttgtgaaaattttatcattcaccgggccattagaaatatgcggtttactacattcacaaatgttttccgccacgctcagcagcagatcgccgggggttacatccgggtcgtagataaaggtcaggttcggcgcaacctgcttcagttcggcatccgcgcgaaggatggctcgggtgacaggcgtatccgccgggccgatattggcatgcataaacgcatcgggcagggttctgtccaggtaacgccagaaacgttttattcggctatcgatttcatcctgtgttagaattttaacataggggctgagtatctcatcgagctggcccagatagaccggcatcgatgtgacggacggaacatggtgataaaggatactgagcagcgagagggcatcatccagatctttagccccttccagctccagccattctgagccgttagccagaaatttagcgtagtccggcagcacgtagcgcggtttgtaaggcgcatggccttcgaacatgtcgcagatgaatccctcgtccagcgcggcccgggccgcctctggcagagcgggatagggcagattgttctctgcttccagcgccagaaaatgacgtttttgttccggggttaacaccgggctggtcacaatgtgctggcaacgttgttgcagggcgtcgggcatgttcacttccttggttgttctgcggatagtgaacgaattgtaggaagccagcctggtggcgcttttgatcagacaggggatatcgccgatttagtcagcaattaacgcactaaaatttgaagaagatctcattacagtaatgcaaatttgcacacagttttcattaactgtgatgaatgtcgaagtgtggatgcgggtgaatgttagaatactcacagacccgcaaggtaaaatttatacggcactgccgttggagaatgttatgaccgatttaactgcaagcagcctgcgcgcgttgaaactgatggacctgaccaccctgaacgatgacgacaccaatgaaaaagtcatcgccctgtgccatcaggcgaaaacgccagtgggtaacaccgccgccgtctgtatctatccgcgctttatcccgattgcccgcaaaacgctgaaagagcagggcacgccggacgtgcgcattgccaccgtaactaacttcccgcacggcaatgacgatatcgagatcgcgctggcagaaacccgcgcggcgattgcgtacggcgcagacgaagttgacgtggtattcccgtaccgcgcgctgatcgccggcaacgagcaggtcggttttgacctggtgaaagcctgtaaagacgcgtgtgcggcggcaaacgtgctgcttaaagtgatcatcgaaaccggcgagctgaaagaagaggcgttgattcgtaaggcgtctgaaatctccatcaaagcgggcgcggatttcattaaaacctctaccggtaaagtgccggtcaacgctactccggaaagcgcacgcatcatgatnnnnnnnnnnnnnnnnnnnnnnnnnnnnnnnnnnnnnnnnnnnnnnnnnnnnnnnnnnnnnnnnnnnnnnnnnnnnnnnnnnnnnnnnnnnnnnnnnnnnnnnnnnnnnnnnnnnnnnnnnnnnnnnnnnnnnnnnnnnnnnnnnnnnnnnnnnnnnnnnnnnnnnnnnnnnnnnnnnnnnnnnnnnnnnnnnnnnnnnnnnnnnnnnnnnnnnnnnnnnnnnnnnnnnnnnnnnnnnnnnnnnnnnnnnnnnnnnnnnnnnnnnnnnnnnnnnnnnnnnnnnnnnnnnnnnnnnnnnnnnnnnnnnnnnnnnnnnnnnnnnnnnnnnnnnnnnnnnnnnnnnnnnnnnnnnnnnnnnnnnnnnnnnnnnnnnnnnnnnnnnnnnnnnnnnnnnnnnnnnnccgtgatatgggcgtgtccaaaaccgttggcttcaaaccggcgggcggcgtgcgtaccgcggaagacgcgcagcagttcctggcgattgccgacgagctgttcggcgccgactgggctgattcccgccactaccgcttcggcgcgtccagcctgctggccagcttgctgaaagcgctgggtcacggtgacggtaagagcgcaagcagctactaagttgaattgccgggtggcgctacgctaacccggcctacaggatcgtagggcgggtcaacatatccgccgccattcacccgattccgcatggaggttaccgtgtttctcgcacaagaaattattcgtaaaaaacgtgatggtcatgcattaagcgacgaagaaatccgcttttttatcaatggcattcgtgataacaccatctctgaagggcagattgcggctctggcgatgaccattttcttccacgatatgtcgatgcctgagcgcgtgtcgctgaccatggcgatgcgagattcaggaaccgttctggactggaaaagcctcaacctcaacggcccgattgtggacaaacactccaccggcggcgtgggcgacgtgacctccctgatgcttggcccgatggtggcagcctgtggcggttacatcccgatgatttccgggcgcggcctgggtcataccggcggtacgctcgacaaactggaagccattccgggcttcgatatcttcccggatgacaaccgcttccgcgacattattaaagacgttggcgtggcgattatcggccagaccagctctcttgctccggctgacaagcgtttctacgcgacgcgtgacattaccgcgaccgtagactccatcccgctgatcaccgcctctatccttgccaaaaaactggcggaaggtctggatgcgctggtgatggatgtgaaagtgggcagcggcgcgtttatgccgacctatgaactctctgaggcgctggccgaagcgatcgttggcgtctccaacggcgcgggcgtgcgcaccactgcactgctgacggacatgaaccaggtgctggcctccagcgccggtaacgcggttgaagtccgtgaggccgtgcagttcctcacaggcgaataccgtaacccgcgcctgttcgatgtcaccacggcgctgtgcgttgagatgttaatctccggcaagctggccaaagacgacgcggaagcccgcgcgaagcttcaggcggtgctggacaacggcaaagcggcggagatctttggtcggatggtggcggcgcagaaaggcccgaccgacttcgtggaaaactacgcgaaatacctgcccaccgcgatgctcagcaaagcggtctatgcggacagcgaaggctttgtctcggctatggatacccgcgcgctcggcatggctgttgtgtctatgggcggcggtcgtcgtcaggcatcggacaccattgattacagcgtcggctttaccgatatggcccgtctgggcgacagcgttgacggccaacgtccgctggcggtgatccacgcgaaagatgaagccagctggcaggacgcggcgaaagcggtgaaggcggcaatatctcttgacgataaagcaccggaaaccacaccgacggtctatcgtcgtatcactgaatagcggtatactgatctgatcgcatttttatgaagcactaagtacggagaacaattatgaaacgtgcatttattatggtgctggactcattcggcatcggcgcaaccgaagatgcagaacgatttggtgacgtgggttccgataccctgggtcacatcgcggaagcctgtgcaaaaggcgaagcggacaacggtcgtaaaggccctctgaacctgccaaacctgacccgtctggggctggtaaaagcgcatgaaggctctaccggtaagatcgcagccggtatggacggtaacgcggaagtcgtgggcgcctacgcgtgggcgcacgagctctcttccgggaaagatactccgtccggtcactgggaaattgccggcgtgccggtgctgtttgactggggctacttctccgatcacgagaacagcttcccgcaggagctgctcgataagctggtgaagcgcgccaacctgccgggctacctcggcaactgccactcttccggtaccgtgattctggatcagcttggcgaagagcacatgaaaaccggtaaaccgattttctatacctctgctgactccgtgttccagatcgcctgccatgaagagacgtttggcctggataaactgtacgagctgtgcgagatcgcccgtgaagagctgaccgaaggcggctacaacattggccgcgttatcgcgcgtccgtttatcggcgacaaagcgggtaacttccagcgtaccggcaaccgtcacgatctggccgtggagccaccggcgccgaccgtgctgcaaaaactcgtcgatgagaaagacggccacgtggtttccgtgggtaaaatcgcggacatttacgccaactgcggcattaccaaaaaggtcaaagcgaccggtctggatgcgctgttcgacgccaccatcaaagagatgaaagaagcgggcgataagaccattgtcttcaccaacttcgtggacttcgactcctcctggggccaccgtcgcgacgtcgccgggtatgctgcgggtctggagctgtttgaccgccgtctgccagagctgatggagctggtgggggaagatgacattctgatcctgaccgctgaccatggctgtgacccgacctggaccggtaccgaccacacccgtgagcacattccggtgctggtgtacggcccgaaagtcaaaccgggctcgctgggtcaccgtgagaccttcgcggacatcggccagacgattgcgaaatactttggtacgtctgacatggaatatggcaaggctatgttctaaacggattgggtgcggcctgatgccctcaccccggccctctcccaccgggagagggagaaannnnnnnnnnnnnnnnnnnnnnnnnnnnnnnnnnnnnnnnnnnnnnnnnnnnnnnnnnnnnnnnnnnnnnnnnnnnnnnnnnnnnnnnnnnnnnnnnnnnnnnnnnnnnnnnnnnnnnnnnnnnnnnnnnnnnnnnnnnnnnnnnnnnnnnnnnnnnnnnnnnnnnnnnnnnnnnnnnnnnnnnnnnnnnnnnnnnnnnnnnnnnnnnnnnnnnnnnnnnnnnnnnnnnnnnnnnnnnnnnnnnnnnnnnnnnnnnnnnnnnnnnnnnnnnnnnnnnnnnnnnnnnnnnnnnnnnnnnnnnnnnnnnnnnnnnnnnnnnnnnnnnnnnnnnnnnnnnnnnnnnnnnnnnnnnnnnnnnnnnnnnnnnnnnnnnnnnnnnnnnnnnnnnnnnnnnnnnnnnnnnnnnnnnnnnnnnnnnnnnnnnnnnnnnnnnnnnnnnnnnnnnnnnnnnnnnnnnnnnnnnnnnnnnnnnnnnnnnnnnnnnnnnnnnnnnnnnnnnnnnnnnnnnnnnnnnnnnnnnnnnnnnnnnnnnnnnnnnnnnnnnnnnnnnnnnnnnnnnnnnnnnnnnnnnnnnnnnnnnnnnnnnnnnnnnnnnnnnnnnnnnnnnnnnnnnnnnnnnnnnnnnnnnnnnnnnnnnnnnnnnnnnnnnnnnnnnnnnnnnnnnnnnnnnnnnnnnnnnnnnnnnnnnnnnnnnnnnnnnnnnnnnnnnnnnnnnnnnnnnnnnnnnnnnnnnnnnnnnnnnnnnnnnnnnnccgctgccgagcgtcagaccaccttcaacgacatgatcaaaatcgcgctggaatccgttctgctcggcgataaagagtaatacctgttgtgccgggtggcggcttcgcctgacccggccagcggttttacaggcccgctaagcagagcgccagcgggcttttttattagcgtactgcctgcgcaatccacgccgataactcccgcaactcttgttcctgttccggaaaatcaacacgtaacgcgtcacactcctgttgcagcatatctgcccgatagagacagccctgcaaacgtgcagccagcgcttctaacggtgccggattaagactatccgtaaatacctgagtacgagagatatggcctttctcgacgtcaaagtgcagctcaacgccgccccaggtaaatcgctcatccagcaggtgtgaaaacgccggtgcctgaccgaaattccactcccagctgctctggcgggcgaaggtttccgcgaagtttggcagatccggggttttatccggagaaatcacctcggcttctacgcgttcaccgtaatgcctgaaaaaggcctcgcggatcgcatcgcaaatgcgttcatgggtaatccccggcaggagctccaccagattcgccacgcgaccgcgcacggaggtaattcccttagcctggagctttttcttgtccggattcagatagtttgccagacggctcagatcggcattcagcaataatgtgccgtggtggaatccgcgatccatcgtttcgcggtaggctgagcctgacactttccggtcgccttcaggcgttttcacgaccagatcgttacgtcccgaggcttcagccgtcacgccgagtgaattgagcgcgttaagcacaatggaggtcgagatggttttgtcgtattccggcttgcccgccataaaggtaaagcaggtgttgcccagatcgtgaaacaccgcaccgccgccgctgctgcggcgcgccaggcggacgttgtcctcttccatacggcgggtgttacactctttccacggattttgcgcgcgaccaataacgaccgtatcggcgttgcgccagagaaacaggacgcgctgggtggcaggcatctggcggaagatgcactcttccaccgccaggttaaaccagggatcgtaagagtcagagattagcaggcgtaacgtcgacatggcagatttccttttccgaatcatccgcctactttatcattattctttcttctcgctctcttcctcttcgggaaccgacttgctggcggttaacaggaacggcgactgctgccagcgggtgcgtttgccctggagcagcgtgcgcgccagtaccacgccaatcgccagcgagagcagcagcatcaggcgcaaaatattggtggtgttatccacctgtttggcttcggttggcagggtgtgggtgtcgagtgtcagacgtaaatagccgagcggaccattcttgccctgaatgggttcgacgatttgttggttgaaataacccccggcttttttgccatccagcgccagcctgtcgcgcacgtcgacatgctcacccgcgcgggcaatcaggtcgccctgttcatcgtacacgcccgcatccagaatgcggctgttttccgtaagctggcgcaatacctgggctattcgcttatcatccggcgtttcggtgcgcatagacggcgcaacgttgagcgtcacctggcgcgccagcgtccgggccagttcctcaaactgcgggttacgctgtcgttggtgattctggctaaaccaggatgccccctgcatcagcgccactaatagtgcgagacagatcaggacaatcacggcgcgatgaagccggaatttcagttttgcgcgagccatattccacctgcttaaaatttacggcttaatgttgccagaagtgatggttacagggtagcctcatgcgttattttccctctggaaccttccggcgcgaacgaaattacaggagcttcaatgccgaacattacctggtgcgacctgccaacggatgtctctttatggccaggattgccgctctctttaagtggcgatgaggtgatgcctctcgattaccacgctggccgtagcggctggctgctgtacggacgcggcctggataagcaacgcctcacccagtatcaaaccaaactgggcgcagcgatggtcatcgttgcggcctggtgcgtggaagattatcaggttattcgcctggcgggttccctgacgcagcgcgccacgcgtctggcgcacgacgccgggctggacgttgcccccctcggcaaaattccgcacctgaaaacgcccggcctgctggtaatggacatggactccaccgccattcagatcgaatgtattgacgagattgctaaactggcgggcagcggcgagctggtggcggaagtcaccgagcgcgcgatgcgcggcgagctggatttcaccgccagcctgagacagcgcgtggcgaccctgaagggggccgatgctaacattttgcgtcaggtgcgcgatgaactgcccctgatgcctgggctgacgcagctggtgctcaagctggagacgctcggctggaaagtggcgattgcctccggcgggttcaccttctttgccgactacctgcgtgacaagctgcgtctgaccaccgtggtggcaaacgagctggagatcatggacggcaaactcaccggacaggtcatcggcgacatcgtggatgcgcagtacaaagccaatacgctgacgcgtctggcggagaaatatgccattccggtcgagcagaccgtcgccatcggcgatggcgcgaacgatctgccgatgatcaaagttgccgggctgggtattgcctaccatgccaagccgaaagtgaatgaaaagacggaagtcactatccgtcatgctgatctgatgggggtgttctgcattctctccggcagcattaatcaaaaatagcggcctgcttttgtaggccgggtaagcgtcagcgccacccggcgcgcagaccgcacagaaataacgaggtaaaccgtggcgaaagctccaaaacgcgcatttgtctgtaatgaatgtggtgcggattatccgcgctggcaggggcaatgcagcgcctgtcatgcctggaacaccatcaccgaagtgcgtggtgtggcggcttcgccgagcgtggcccgcaatgaacggctgagcggctatgcgggcaatgcaggcgtgtcgaaggtacaaaaactttcggatatcagcctggaagcgctgccgcgcttttccaccggattcaaagaatttgaccgcgtgctcggcggtggcgtagtgccgggcagcgccattctgatcggcggtaacccgggcgcgggtaaatcgaccctgctgctgcaaacgctctgcaagctagccgaacagatgaaaaccctgtacgtcacgggggaagaatcacttcagcaggtggcgatgcgcgcgcaccgcctcggcctgccgaccggcaatctgaatatgctttcggaaaccagcatcgagcagatctgcatgatcgccgaagaagagcagccgaagctgatggtgattgactccattcaggtgatgcatatggctgacattcagtcgtcaccgggaagcgtggcgcaggtgcgtgaaaccgcggcctacctgacgcgctttgccaaaacgcgcggcgtggcgattgtgatggttggtcatgtgaccaaagacggctcgctggcgggaccgaaagtgcttgaacactgtatcgactgctcggtgatgctcgatggcgatgcggattcccgttttcgtaccctgcgcagccataaaaaccgctttggcgcggtgaatgagctgggcgtgtttgccatgaccgagcaggggcttcgcgaagtcagcaacccgtcggccatcttcctgagccgtggcgacgagatcacgtccggtagttcggtgatggtgctgtgggaggggacgcgtccgctgctggttgaaattcaggcgctggtggatcaatcgatgatgggcaacccgcggcgcgtggcggtcggtctggaacagaaccgcctggcgatcctgctggcggtgctgcaccgtcacggcggtctgcaaatggcggatcaggatgtgttcgtcaacgtggttggtggggtgaaggttacggaaaccagcgcggacctggcgctgctgctggcaatggtctccagcctgcgcgacagaccgttgccgcaggatctggtggtatttggtgaggtagggctggccggcgagatccgcccggtgccgagcggtcaggagcgtatctccgaagcggcaaaacatggcttccgccgcgcgattgttccggccgccaacgtgccgaaaaaaattccggaagggatgcaggtttttggcgttaaaaaacttgcagatgcgttaaatgtctttgacgacttataattacgtattcgattttgcaggaggcaccgtaatttatgtcatcatttgactacatcaagaccgctatccgccagaagggctgcacgttgcagcaggtggcggacgccagcggcatgaccaagggctacctgagccaactgctgaacgccaaaatcaaaagccccagcgcgcagaagctggaagcgctgcaccgttttctggggcttgaatttccgcggatgcaaaagaacattggcgtggtgttcggtaagttctacccgctgcataccgggcatatctatctgatccagcgcgcctgtagccaggtcgacgaactgcatatcatcatgggttatgatgaaacccgcgatcgccagctgtttgaagacagcgccatgtcgcagcaacccaccgtgccggaccgcctgcgctggctgcttcagacctttaaatatcagaaaaatattcgtattcatgcctttaacgaagagggcatggagccgtatccgcacggctgggacgtgtggagcaacggcatcaaagcgtttatggaagagaagggcattgcgcctaactggatctacacctctgaagagtccgacgcgccgcagttccgcgagcatctgggcatcgagacggtgctgatcgatcctaaacgcaccttcatgaacatcagcggggcgcagatccgcgagaacccgttccgttactgggactacatcccgaccgaggtgaagccgttcttcgtgcgtacggtggcgatcctcggcggcgagtcgagcgggaaatcgacgctggtaaataagctggcgaacatcttcaataccaccagtgcgtgggagtatggtcgcgattacgtcttctcacaccttggcggcgacgagatggcgttgcagtattccgactacgataaaatcgcgctcggtcatgcccagtacattgattttgcggtgaaatacgccaataaagtcgcctttattgataccgatttcgtcaccacgcaggcgttctgcaaaaagtacgaagggcgcgagcacccgtttgtgcaggcgctgattgacgaataccgctttgacctggtgatcctgctggaaaacaacaccccgtgggtggccgacggcatgcgcagcctgggcagctcggtggacaggcgggagttccagaccatgctggtagagatgcttaacgagaacaacgttgagtttgtacatgtggaagagtcggactacgactcccgcttcctgcgctgcgtcgagctggtgaaggagatgatgggggagcagggttaataacttcccctctcccaccaggagagggggctttaatcgccctctccctttgggagagggccggggtgagggaatcagttcactcaatactcaaccaccaccttcccacgcatatgcccctccagcaccctgcggtgcgcttcggtaatgctttccacgcttagcccgtgcagcgtttcgctgagcgagctttccaccacgccgttatccaccagcttcgccacctcatctaaaatctcaccctgacgcgccatatccgtggtctggtacatgctacgggtgtacataaattcccagtgcagggcggcagatttggacttcagcttgtcttggttcagcggatgcgcgttttcaacgatggaacaaatgtctccctgaggggcaatcagatcgctgaccgcatcccagtgcccgtcggtatcgttgaggataaaaatgtaatccacaaaagtgagcccctgtttcgccagttcacccttcaggtcgtggtaatttacgacaatgtcagccccgcgatcgcgacaccaccgggcggaatcttctcgtgaagcggttgcgacgatcttcaccttgctgttgtgcttcgcaaacgggatcgccagcgatccgactccacccgcgccgccaattatcagcagcgttttatctgcgtcggcatcctgaatcttcagccgttcaaacaggccttcccacgcggtaagcgccgtcagcggcagtgctgccgaggcggcccagtcaaggcttgcaggcttgtgcccgacaatgcgcgcatcgatcagctgatgcgtggtattgctgcccgggcgggtgatgtcccccgcgtaccacacttcgtcacccggtttgaatccggtgacgccagccccaacggcttttacgataccgctggcatcccacccgagaatgcgcggctccttcagtccgcttttggcaatgcctgcatgtaccttggtgtccaccgggtttacggagacggcttttacctccaccagcagatcgtgttcaccgggctgcggcatcggcggagtgatttcaacgaaggtggagggattttccgggttaacggcaatggctttcactgacatggtgtgctcctcaatggcatgcgttttgttgaggctagtctattaagtggtcagctgcatgataagatggacaatcaagaactcagcgttcgtacagggtgaacaatcatgtttaaacagcttcaggatatggcgctttttgcgctggtggccgagatgggcagctttaccgcggcggcgcagaaggcggaactgccgaaatccagcgtcagccagcggattagccagctggagcaacaggtggggatccgtctgttgaatcgcaccacgcgcagaataagcctgacgtttgcaggcgagcactatctggtgcactgtcgcgagatgctggcggccagcgagcgcgcggagtatgccattcagcggctgcgcgaaaaccccagcgggcggctgcggatcacctgtccggcgggaattggcgcgacgctgctggcgcatatgaatgccgagttccagcttcgctatccggacgtgtcgctggatgtgtcgatctcagacgacgtggtggatctggtcgagtctggctttgacgtggcgctgcgcaccggcaaaccgcaggattcttccctgattggccgcatgattgggcactgtccgcgctacatgctggcctcgccccactacctggcgcgtcgggcgccgttaatccatccccgacagctggtggagcaccgctgcattacgcaccgggcatggtcggagtggcttctgcgaagcgagagtgaggattaccgctacctgccggataacgcccatatgaccgataacctggtgtacgcccgggaatgcgccattgccggggcggggatcacgctgttacccgcattcctgctggaagataagatcgaaaagggcgcgctggtgaaggtgctgccggcgtggagcgttgagggaaacgatctctggctggcctacccgagccgtaagctcaattcgcctgcgctgatgagctatatcgactttgcgatgcagtttgatgaggtgaagcggtattacgtgggcaaataaaaaagccgggtggcggcttcgccttacccggcctacacactgtgcggcctgatgccctcaccctggccctctcccacggggagagggtacaaacataaaaaacggcaaccgaagttgccgttttgcttttatttcgcaatacgcttgtacttaatacgcttcggctccagcgcgtctgcgcccagcgtgcgtttcttgtactcttcgtattcggtgaagttaccttcgaagaactccaccttaccttcgtcctggtagtccaggatgtgggttgcgatgcggtccaggaaccagcggtcgtgcgagataaccatcgcgcagcccgggaactccagcagggcgttttccagcgcgcgcagggtttcgatgtccagatcgttggtaggttcatcaagcagcagaacgttgccgccaacctggagcagtttcgccaggtgcagacgaccgcgctcaccgccggacagctcgcccacgcgtttgccctggtcagtgcccttaaagttannnnnnnnnnnnnnnnnnnnnnnnnnnnnnnnnnnnnnnnnnnnnnnnnnnnnnnnnnnnnnnnnnnnnnnnnnnnnnnnnnnnnnnnnnnnnnnnnnnnnnnnnnnnnnnnnnnnnnnnnnnnnnnnnnnnnnnnnnnnnnnnnnnnnnnnnnnnnnnnnnnnnnnnnnnnnnnnnnnnnnnnnnnnnnnnnnnnnnnnnnnnnnnnnnnnnnnnnnnnnnnnnnnnnnnnnnnnnnnnnnnnnnnnnnnnnnnnnnnnnnnnnnnnnnnnnnnnnnnnnnnnnnnnnnnnnnnnnnnnnnnnnnnnnnnnnnnnnnnnnnnnnnnnnnnnnnnnnnnnnnnnnnnnnnnnnnnnnnnnnnnnnnnnnnnncaacgtaagcgcggcttggcatctcggtgttgccgatacgcatgatatccagaccgccggaaacctcttcccacacggttttgctgttatccattgcgtcgcggaactggtccacggaagccagcttcacggtttcacccagggtgatagagccgctgtcaggctgttcctgaccggacatcatgcggaacagggtcgatttacctgcgccgttcggaccgatgatgccaacgatagcgcctttcggcacggagaaggtcaggtcgtcgatcagcagacggtcgccgtaggacttacgcaggttggtcacttcaaccactttatcccccagacgtgcgccaggtggaataaacagttcgttggtttcgttacgtttctggtattcagtgttgttcagctcttcgaagcgtgccagacgtgctttgcccttggactgacggcctttcgcgccctgacgcacccactccagctctttctcgatagacttacgacgcgccgcttcctgagatgcttcctgcgccagacgctgatctttctgctccagccaggaggagtagttgccttcccacggaataccttcgccgcggtccagctccaggatccagcccgcaacgttgtcgaggaagtaacggtcgtgggtaatcgccaccacggtgccttcgaagtcgtgcaggaagcgctccagccacgccacggattccgcatccaggtggttggtaggttcgtcgagcagcagcatgtctggtttttccagcagcaggcggcacagcgccacgcggcggcgttcaccaccggacaggttagcgattttcgcatcccagtctggcagacgcagggcatcagccgcgcgctccagctgcacgttcaggttgtgaccgtcgtgcgcctggataatctcttcatatttgccctgctgagcggccagtttgtcgaagtccgcatccggctcggcgtatttggcatacacttcatccagacctttcagggcgttaaccacctcggataccgcttcttcaacggattcacgcacggtgtgttccgggttcagctggggttcctgcggcaggtagccgatcttaatgccaggctgcggacgggcttcaccttcgatgtctgtatcgatgccggccatgatgcgcagcagggtggacttaccggcaccgttgagacccagaacaccgatttttgcgcccgggaagaagctcagcgagatatttttaagaatatgacgtttcggcgggacaactttgccgacacgatgcatggtataaacgaattgagccacgttggacttcgcctcttttatcgtgatgagaatgaatttcagcctcgaagtgtagcctttttcacgccctaatcccagccaggaacgtcgggagtgttaaaacgcgcaagaaaggtaaaaaagtgtccatgacgtggcgcgttgtgggatgcctggttagcataagttgatgtaactttgacgtggcaagacgctgcaactgacgaaaaacaatgaggaagagcttgtggaaaaagccaaacgggtggtctggcgtctgctggctgccagcgtatgcgtaatggcggtaagccaggcggtgcatgccgattcactggatgaacaacgtaaccgctatgcccagattaaacaggcatgggacaacaagcagatggataccgtgcaggcgctgatgccgacgctgaaggattatccgctgtatccgtatcttgagtatcgtcagatcacggacgatctcatgaatcaaccgaccgtcaccgtgaataacttcattcaggcgaacccgaccctgccgcctgcgcgcaccctgaagtcccggtttgtgaacgagctggcccgtcgcgaagactggcgcggcctgctggccttcagcccggataaaccgggcgcgacggaagcgcagtgtaattactattatgcgaaatgggcgaccggtcagcaggaggaagcctggaccggcgcgaaagagctgtggctgacgggcaaaagccagccaaacgcctgtgacccgctgttcagcgcctggcgcgcctcgggcaagcaggatccgctctcttacctggaacgtattcgcctggcgatgaaggccggaaacacccggctggtcaccgtgctggcgggccagatgcccgcagattatcagactattgcgtctgccgttatcagtctggcaaacgatcccaataccgtgctgacgtttgcgcgtaccaccggcgcgaccgattttacccgccagatggcggcggtggcctttgccagcgtggcgcgtgatgatgtggaaaacgcccggctgatgatcccgcagctggtgcaggcccagcagcttaatgacgatcaaactcaggagctgcgcgatatcgtggcatggcgactgatggggacagatgtcaccgacgaacaggcgcgctggcgtgacgatgcggtgatgcgttcaaactctgtctcgctggtggagcgtcgcgtgcgcatggcgctgggaacgggcgatcgtcgtggcctcaatacctggctggcgcgtctgccgatggatgccaaagagaaagatgaatggcgttactggcaggcggacatgctgctggaacgtggtcgtgaagatgaagccaaagagatcctccactccctgatgcagcagcgtggattctacccgatggcggcggcgcagcgtctgggcgaggagtacaccctgaagatcgacaaagcgccagccaacgcgaacccggcgctgacgcaggggccggaaatggcgcgcgtgcgcgagctgatgtactggaatctggataataccgcgcgcagcgaatgggcgaatctggtcaccagccgtaccaccgatgagaaagcgcagcttgcccgctatgcatttgataatcgctggtgggatctgagcgtgcaggcgacgatcgccggcaaactgtgggatcatctcgaagagcgtttcccgctggcttataaggatctgttcgatcgctacaccagcggcaaagatattccgcaaagctacgcgatggccattgcccgtcaggagagcgcctggaacccgaaagtgcgttctccggtgggtgccagcggcctgatgcagattatgccgggtaccgcgacgcacacggtgaagatgtttaatattccaggctacagcagcccgtcccagctgctggatccggagactaacatcaacatcggtaccagctacttgcagtacgtctatcagcagttcggtaataaccgtatcttcgcgtcagcggcgtacaacgccgggcctggccgcgtgcggacatggcttggcaacagcgcagggcgcatcgacgccgtggcgtttgtcgagagcattccgttctcggaaacgcgcggctatgtgaagaatgtgctggcttatgacgcctactatcgctacttcatggggcagaaagataccctgatgagcgatgccgagtggcagagacgttactgatcggcgcgggttgtgttatgctgtactcgctaatgagtacaagaggcagcataacatgacccagcattccccgtattcctcggccatggccgaacagcgtcatcaggagtggcttcgttttgtggagttgctccgccagtcttacgacaaagatctgcatttaccgttgctacagctgatgctgacgcccgatgaacgcgaagcgctgggcacgcgggtacgcattattgaggaactgctgcgcggcgaaatgagccagcgcgagctgaaaaacgagctgggcgcgggcatcgcgaccatcacccgtggttcaaacagcctgaagtcggcgccggttgaactgcgtcagtggctggaagcggtattgctgaaaaacgccggatgacggcttcgccttatccggcctgcaaacttaacgataaatcgcgttatggaacggacttaacgccagaataacggcctggtggtaaacgcctgaacgcgtaagcttgccacccgtaaagacgccaatcgccccctctttacgaccaatttcatcaatgccggtgtagtgcgacattaccggccccagcgcctcacccgcgcggactttctccagtatgacttccggcagcggcagcgtggcagaacgcgcttcgccgcgctgctcacggctttcgatgacaacccagctgaaggtcgccccttcgtcgatgcctgcttcaatcgcgacccagaagtcagcgtctggcgcggcggcttttgcattcgccacgcgatttcgtgcgccagcgcgtgtttcctcgctgccaaacggctgttccggcacaccgctctcgacgccgacggcgtcaatatggcaggatccttcgccgaagatctcttcaaatgcccttagaattgcctgaattttggcaggattggtggtagcagagacaacatggtgcataattaagctcgatttaaaaaattcatcgcagtataacggaaaaaaagcatgttacaggtataccttgttcgccacggtgaaacgcagtggaacgccgagcgacgtattcaaggccagtcagacagtcctctcaccgacaaaggtgtgcagcaagcgtggcaggtggcggagcgcgccagaacgctgggtatcactcacgtcatctccagtgatttaggccgcacgcagcagacggcacgcatcatcgccgatgcctgtggctgcgacgtgaccctcgaaccgcgtctgcgcgagctggatatgggcgtgctggaaaaacgtcctatcgatacgctgacggaaaccgaagaaggctggcgccgcacgctggtgaacggcactgaagatggtcgcatccctgaaggggaatccatgcaggagctgagcgtgcgcatgcatgccgcgctggccgagtgcctgaaactcccggcaggtagccgaccgctgctggtaagccacggtatcgcgctgggttgcctggtgagcaccattctgggactgccggcttacgccgaacgccgtttgcgtctgcgcaactgttccatttcccgtatcgactatcaggaaagtgcctggctggcatcggggtgggtagttgagatggcaggggacatttcgcatcttgatgcccctgctctggacgaattgcagcgttaacgacgtaccggaatcaggaattccatacgcagattgatagggccttcttccggtttagcatcttgcgccggatagtagcgctcaatgtcctgacctttacggcgattcagattcagcatcggcatgcaggtcccgtaaacggtcaggatgaactcctgaacgcccgttcctaaaccttcgtatgagaacatcacatactcgccgccttccagcacgacaggcttcgagccatgaatgtaaccgttcgccatgtcaggcgtcagcgccgtggtatagaacacctcctgctcgtcgtctttttcctggctgggatgcgtttcgttcaggccatacagaatcggcgggagcgccggagcatggcttaaaaattcgcgccagaactgaacgcgcatctgatggcggaactcggagatctgctccagggaacaggagtagctctgcgtggtgccgaccaggtgcgtttccggcagggtgatgatttcatattttggcatcgcaaactcgcccagacgcagcggcggacgcataccaaaggagctccagtccggcgagcggcgataaagcgctggcgttaacgagaactgttttttaaaggcgcgggtgaaggtttgctgtgaatcgaagcgatattgcagggcaatatccaggattggtcgcgcggtcaggcgcaacgcgacagcagactttgataaacgacgtgcgcgaatataggcaccgatagcatgaccggtgacatccttgaacatcctttgcagatgccacttggaatagcctgcttttgccgccacattatccagtgacaaaggctggtcgagatgaccttccagccaggtgagcaggtcgcgaataattccagcctgatccatatactatcctcatccttaaaactgccgcaggtgcctgtttacaggttagcggataatagcattttttgtacgttttagcattcagtgtttttttgcgcataaatgctttttgtagtgatttatgtgcggatatattctaatcctgtgatcttgctacatttttatctaacctgttgaataatcgctcagcgtaatttttatgaatggtaacaatatgaaatacaaggttttagtctttacagcactggcgctgatggcagggcgcgtggcacaggcggagcaaattggctccgtggatactgtgtttaaaatgtttgggccggaccacaaaattgtggtggaagcctttgacgatccggacgttaaaaacgtcacctgctatgtcagccgggcaaagaccggcgggattaaaggcggcctggggctggctgaagacacgtctgacgcggccatctcctgccagcaggttggcccggtggaattgagtgacaaaatcaaaaacggcaaagcgcagggcgacgtcgtattccagaaacggacctcgctggtgttcaaaaagctacaggtggtccgtttttatgacgcgaagcgtaacaccctggcttatctggcttattccgacaaagtcgtggacggctcaccgaaaaacgcgataagcgcggtaccgattatgccgtggcattgataaaaaaaacggcgcaaatgcgccgttttttactgcgtgacgggagaattactcctggaggtcaccgcagaaacgatagccttcaccatggatcgtggcgatgatttccggcgtatccggcgtagattcgaagtgcttacgaatacgacggatggttacgtcaacggtacgatcgtgtggcttcaactcacgaccggtcattttcttcagcagttctgcacgggactgaatcttgcccgggttctcgcagaagtgcagcatcgcgcggaattcactgcgcggcagtttgtactgctcaccgttcgggctaatcagcgaacggctattgatatcaagttcccagccgttgaatttgtagctgtcgacgctacgacgctcttcacttaccgtacccagattcatggtgcgggacagcaggttgcgtgcacgaatggttaactcgcgagggttgaacggcttggtgatgtagtcatccgcgccgatttccagaccaagaattttatcaacctcgttgtcacggcccgtcaggaacatcaacgcgacgttcgcctgttcacgcagttcgcgcgccagaagaagcccgtttttgcccggcaggttgatatccataatcaccaggttgatatcattttcagaaaggatctgatgcatctctgcgccatcggtcgcttcaaagacatcgtagccttctgcttcgaaaatgctctttaacgtgttgcgtgttaccaactcgtcttcaacgataagaatgtgcggggtctgcatgtttgctacctaaattgccaactaaatcgaaacaggaagtacaaaagtccctgacctgcctgatgcatgtcgcaaattaacatgatcggcttaacgtgactaaagtacgtaattgcgttcttgatgcactttccatcaacgtcaacaacatcattagcttggtcgtgggtactttccctttggacccgacagtgtcaaaaacggctgtcatcctaaccattttaacagcaacataacaggctaagtgacaccggacacccaataaaactacgcttcgttgacatatatcaagttcaattgtagcacgttaacagtttgatgaaatcatcgtagctgaatgctagcctttgtcacaatttttcaataaaccaactagttgcggacattgattgataaacggtacgaatccaatcagaaaagagtattcatatggtcattatcattacaaaacataaggataatggacttctgttaacattctaactgattgttcagccacaaaatagtttagctttttttaattgttatgaaacgctatttcggtgatttgtgttgcaaaattgtaaattcgtgctgcgtaatatgttgaactgaatcacatttttacctgctaactgattaaaaagagagcgtaaatgcatctgtcgattgtgctggtggcaccagcaagagctgaaaatattggcgctgcggcgcgtgccatgaagactatggggtttaccgatttgcgtattgtggacagcacggcgcatctggagcctgctgcgcgctgggtggcgcacggttcgggtgatattctcgataatataaccacttacgctacgctcgccgacgcactccacgatatttcgtttaccgtcgcgacgaccgcgcgcagccgggcgaagtttcactattacgccacgcctgctgaactggtgccgatgctggaagagaaaagcctgtggctggagaaagccgcgctggtgtttgggcgagaagattccgggctgactaacgaagagctggagctggctgacgtgctgacgggcgcgccgatggtggcggattatccgtcactcaatctggggcaggcggtgatggtctattgctatcaattagcatccttaatacaaatttctcagccaccggtgacagtttcggatgaaaaccagctggcggcactgcgtgttcgtgcagataagcttcttgagcagttgggcgtcgctgacgatcaaaaaatggtggactggttacagcagcgcctggggcgtcttgagcagcgcgacacggcaatgctgcaccgattgcttcatgatattgaaaaaaaattagccgagtaaaatagtgtcataggtttttattatggccgatcctgctgatgtctggggttgcatctggggtattccgatgaaaataaatctgcccgcagcgggacgtgagaatatctcgaattgtgatcgaattaaaaattcattgacttaaggggctcgatcctttaaccctaaaagaatagagcacagacagataataatgacagagtacacaacatccatgaaacgcatcagcatcaccaccattactacaaccatcatcattaccacaggtaacgatgcgggctgacgcgtacaggaaaaacagaaaaaagcccgcacctgaacagtgcgggcttttttttcggctaaaggaaatgaggtagaaccatgcgagtgttgaagttcggcggtacgtcagtggcaaatgcagaacgttttctgcgtgttgccgatatcctggaaagcaacgccaggcaggggcaggttgccaccgtgctctctgccccggccaaaatcacgaaccacctggtggcgatgattgaaaaaaccatcggtggtcaggatgcactaccgaacatcagcgacgccgagcgtatctttgccgatctgcttcaggggctggccgacgcccagcctggtttcccgctggcgcagctgaaaagcaccgttgaacttgaatttgcccagattaaacacgttcttcacggtatcagcctgcttggtcagtgcccggacagcatcaacgcggcgctgatttgccggggtgaaaaactctctatcgccatcatggctggcgtgctggaagcgcgcggtcaccacgtgacggtcatcgatccggttgaaaaactgctggctgtgggccactaccttgaatccaccgtcgacattgccgagtcgacacgccgtattgcggcgagcaaaatcccgtctgaccatatgatcctgatggcaggctttaccgccggtaacgagaagggcgaactggtggtgctggggcgtaacggctctgactactccgctgccgtgctggcggcctgtttacgcgcagactgttgtgagatctggactgacgtcgacggcgtttatacctgcgatccgcgccaggtgccggacgccaggctgctgaagtcgatgtcgtaccaggaagcgatggagctttcctacttcggcgctaaagttcttcacccgcgtaccatctccccgattgcccagttccaaatcccttgcctgattaagaataccggtaaccctcaggcgccgggcacgctgattggcgccagcgcggatgaagatgacctgccggtgaaaggcatttctaacctcaataacatggcgatgttcagcgtctccggcccggggatgaagggcatggtcggcatggcggcacgcgtctttgccgctatgtcccgcaacgggatctctgtggtgctgatcacgcagtcttcttccgaatacagcatcagcttctgcgttccgcagggtgattgcctgcgtgcccgccgcgcgctggaagaagatttctatctggagctgaaagaagagctgctggagccgctctcgattcaggaacgtctggcgattatctctgtggtcggcgacggcatgcgcaccctgcgcggtatctccgccaaattctttgccgcgctggcgcgggccaatatcaatatcgtggcgattgcccagggctcatcagagcgttccatttccgttgtcgtggataacgatgacgccactaccggcgtgcgcgtggtgcatcagatgctgttcaacaccgaccaggtgattgagctgttcctggtgggcgtcggtggtgtcggtggcgcgctgctggagcaggtgaagcgccagcaggagtggcttaagaagaaacatatcgatttgcgcgtttgcggcattgcgaactcgaaagcgttgctgactaacgtccacggtctgaatctggaaaactggcaggcggagctggaagaggcgaaagagccatttaacctgggccgcctgatccgcctggtgaaagaatatcacctgcttaacccggtgattgttgactgtacctccagccaggcggtggccgatcagtacgccgacttcctgcgcgaagggttccacgtggtgacgccaaacaaaaaggccaacacctcgtcgatggattactatcaccagctgcggctggcggcgagtaagtcgcgccgtaagtttctgtatgacaccaacgtgggcgcgggcctgccggtcatcgagaacctgcaaaacctgctgaacgcgggcgacgaactacagcgtttctccggcatcctctccggctccctgtcgtttatcttcggcaagctggacgaagggatgagcttgtcggaagccacccgcgccgcgcgcgagctgggctacaccgagccggatccgcgcgacgacctctccggcatggacgtggcgcgtaagctgctgatcctggcgcgcgaaactggccgcgagctggagctttcggatatcgtgattgagccggtgctgccagcagaatttgatgacagcggtgacgtcagcgcctttatggccaggttgccgcagcttgacgacgcctttgccgcacgcgttgcgaaagcccgtgatgaaggtaaggtattgcgctatgttggcaacattgaagaagacggcgtctgccgggtgaagattgccgaagtggatggcaacgatccgctgtacaaggtgaaaaacggcgagaacgccctggcgttctacagccattattatcagccactgccgctggtgcttcgcggctatggcgcagggaatgatgtgacggcggcaggcgtgtttgccgatctgctgcgtaccctgtcatggaagttaggagtttaagatggttaaagtatatgccccggcttccagcgccaatatgagcgtcggatttgacgtgctgggcgcggcggtcacaccggtggacggttcgctgctgggcgatacggttacggttgaggcggcagagcgcttcagcctgaataacatcggccgcttcgccagtaagctgccgtctgaaccgcgcgagaatatcgtttatcagtgctgggaacgcttctgtcaggagatcggcaaaaacgtgccggtcgccatgacgctggaaaagagcatgccgattggttcggggctgggctcgagcgcctgctcggtggtcgccgcgctggtggcgatgaatgagcattgcggcaagccgctgaacaacaaccgtctgctggcgctgatgggcgagctggaagggcgcatctccggcagcattcattatgataacgtggcgccgtgcttccttggcggcatgcagctgatgattgaagaaaatggcatcatcagccagcaggtgccagggtttgatgagtggctgtgggtgctggcctatccgggcattaaagtgtctaccgccgaagcgcgtgcgatcctgccggcgcagtatcgtcgtcaggactgtatcgcccacgggcgtcatctggcgggctttattcacgcctgctacacccgtcagccgcagctggcggcgaaactgatgaaagacgtcattgccgagccgtatcgcacgaagctgctgccgggctttaacgaagcgcgacaggcatccatggatatcggcgcacaggcgtgcggcatctccggctccggcccgacgctgttcgccttatgcgacaagccagacaccgcgcagcgcgtggcggactggctctctaaacactacctgcaaaatcaggaaggctttgttcatatttgccgtctggacacggctggcgcacgagtactgggataacgaatgaaactctacaaccttaaagatcataacgagcaggtcagcttcgcgcaggcggtaacgcaggggcttggcaaaaatcaggggcttttcttcccccacgacctgccggaatttcagctgaccgaaatcgatgagctgctgaagcaggactttgtcacccgcagcaccaaaattctgtctgcctttatcggcgacgaaatcccgcaggagctgctcgaagagcgcgtgcgtgcggcgtttgctttcccggcgccggtgaagcaggtggagcctgacgttggttgtctggagctgttccacggtccgacgctggcgttcaaagatttcggcggtcgctttatggcgcagatgctgacccacatcagcggcgacaaaccggtgaccattcttaccgcgacttcaggcgataccggagcggcggtggcccatgcgttctacggcctgaaaaacgtccgcgtggtgatcctctatccgaaaggcaaaatcagcccgcttcaggaaaaactgttctgcacccttgggggcaacattgaaaccgtggcgatcgacggcgatttcgatgcctgtcaggcgctagtgaagcaggccttcgatgacgaagagctgaaggcggcgctggggctgaactctgccaactccatcaacatcagccgtctgctggcgcagatctgctactacttcgaagcggtggcgcagctgccgcaggacgcgcgcaatcagctggtggtttccgtgccaagtgggaacttcggcgacctgacggcaggcctgctggcgaaatcactcggcctgccggtgaagcgctttatcgccgccaccaacgccaacgacaccgtgccgcgtttcctgaaggacggaaaatgggcgccgaacgcgactcaggccacgctctccaatgcgatggatgtgtcacagcctaacaactggccgcgtgtggaagagctgttccgccgtaaggtctggcgtctgggcgatctgggttacgcagcggtgacggacgaaaccactaaagccaccatgcgcgagctgaaagcggtgggctatacctctgagccgcacgcggcgattgcctatcgtgccctgcgcgatcagcttcaaccgggtgagtatggcctgttcctcggcaccgcccatccggccaagttcaaagagagcgtggaagcgatcctgggggaaacgctgccgctgccaaaagagctggccgatcgcgccgacctgccgctgctgtctcatgagctgcccgcagactttgccgcgctgcgtaagctgatgatgacccgagcgtgattgtgctgcccggtggcggcttcgccttaccgggcctacaacggcgaactcatcgtaggccgggtaagcgcagcgccacccggcttttttgtgaagaaattaaggagaaaaacagcaggaaaaaagcagaaattcccaataaatgcggtcacttagcgtttaggattgcagagaataacatcccccgtccccatcacgtactctccttacatcggcccacgttgggcaagaagaataaggagtcacctatgtctacactgaaacctgcacttatcgcgctttcactgatgctggtcgctcccatggcggtgcaggcagctgagatcaccctcgtgccagcggtaaaactgcaaattggcgatcgggataataacgggcactactgggatggcggccgctggcgcgaccatgactggtggaaagcgcactatgactggcgcgataaccactggcgtccgcacgatgaacatcgcgatcgtgacgatcaccaccgtcatgacgatcgtcgcccgggcccggaccggaagcaccattaacacaaaccccgccagctggcggggttgtctttttattgctcgtgacgcttaaacaccagctcgttttttcctgacgatgcctcgtcgaagaaatacccttcactgttaaagccggtgagctgctctggcttcgtcagacggttttgaatgatgaagcggctcatcagaccgcgcgcttttttggcgtagaagctgatcactttaaatttgccgtttttctcgtcgaggaataccggcttgataatgtccgcatccagcttcttcggcttcaccgatttgaagtactcatcggaggccaggttgatcaccacgttgtccccctgggcttgcagcgccgcgttaagcttgtcggtaatgacatcgccccagaactggtacagatctttacctttagcgttttccaggcggatacccatctccagacgatacggttgcatcagatccagcggtcgcagcaccccgtacaggccggataacatgcgcagatgcagctgggcaaaatcgaaatcggcttcgctaaacgtttctgcttgcaggccagtgtagacgtcacctttgaaggccaacagcgcctggcgggcgttggcgggcgtgaagtcaggctgccactcatgaaaacgggtggcattcaggtcggcgagtttatcgctgatgctcatcagcgaagcgatttgcggagccgaaagcttacgcgcctcgtggatcagctgttgcgagtagtccagcaattccggctgggtataacgctcagtggcgagcgggctctggtagtcgagcgttttggcaggtgaaatcagaatcagcatatccagtccttgcaggaaatttagagcgactttaacaaaaaatcgccctgaattgatcgatagctgttattgccgcggcaaatcatcccaggtgccaggggcaatttgtgactcgatttcgggatagcgtgaggcgtcaaagacgggctgtacgccgagcttgcgctgacgcagataatcgcgcgcgatcagcgccacaaccggtgaaagcagcaaaatggccgtcaggttcgtgatggccatcagcgccataatgacgtccgctatttgccagatcatcggcatgctgagcaggcaacctacaaacaccatcgccagcacgcccgcgcgaaggatgttgcgggccagacgcgagtcaactttcaggaagataaggttgttttcggcatagatatagttcaccgcaatggaactaaaggcaaaaagtcccacgacaagtgcgacaaggcccgcgccccagctgccgacgagggagaccagcgcctgttgtacccaatgaatgcctgccgtactaccggacggttgttcagcggcaccggccagcagcattatcatcgcgctggcggagcagataacaatggtgtctgtgaagacgccaatcatctgtacaatgccctgcgcggcgggatgtgggggccaggatgcggccgctgcggcggcattcggcgtggagcccattcccgcttcgttggagaacataccccgctgaaaacccgcagtgagtgcctggctaagggtgtaacccagcgcgccggaagccgcttcgcgccagccgaacgcgctttggaaaatggtgacgatgacgttcggcacctcgtcgatatgtatcgcgcataccatcaggctggtggacacccacagcagcgccatcagcggaaccaaccactgcatcaggcgggcaacccctttgagcccggtcacaatggtcagcagggtgagaagggcaagcgcgccgcccgtcagccactccggacaattgaaggcaaagcgcagcgcgtgggcgacggaatttgcctgaacggtattgaaaataaggccataggcaatcagcaaaaagatcgagaacagaacgcccatccagcgcattcccagcccgcgagccatataccaggcgggaccgccgcgaaactgacctttgccgtctttttctttgtagagttgcgcaagcgagcattcagcaaaggaggtggccataccgataatcgccgtcacccacatccagaataccgcgcccggaccgcccgcgccgatcgccagcgcgacaccggccaggttaccgctgccgacgcgcgcggccaggctggtacagagcgcctgaaacgaggtcaggccgcccggctgtggggtgacgctgtttttcagacttctgccaaatttgcggatatagcgaaactgaatcagaccgctgcgccaggtaaaccagatacctgctcctgaaagcaggtatatcatgatcgaaccccagaggacttcgttgataaagaaaaagaaatcaggcactaacgtccctcttgttgatgccaaagtgaatatgtaagcgctaccacttattgtgcatgctgttacttagcagcctgttaatattctgagtttatcatactctgcctaagcgcactgtctgcggttgcgctgcctctcactcgtgttatcatcagggcagaccggttacatccccctaacaagtaaacctgtcatttttccgctgctggcaagctgtcggtagtgtgaattatccagggcacgttaaaagagaaacactatcatgacggataaattgacctcccttcgtcagttcaccactgtcgtcgctgacaccggagatatcgcggcaatgaagctgtaccagccgcaggatgccacaaccaacccttctctgatccttaacgccgcgcagatccctgagtatcgcaaactgatcgacgaggcggtgacctgggcaaaagcacagagcaatgaccgcgcgcagcaggttgtggatgctactgacaaactggcagtgaacatcggtctggaaatcctgaagctcgttcctggccgtatctctaccgaagttgatgctcgcctgtcctacgacaccgaagcgtctatcgcaaaagcaaaacgcctgatcaaactgtacaacgatgcgggcatcagcaatgaccgtatcctgatcaaactggcgtctacctggcagggcatccgcgctgctgagcagctggaaaaagaaggcatcaactgtaacctgactctgctgttctccttcgcgcaggcgcgtgcatgtgccgaagctggcgtatacctgatttctccgttcgtgggccgtattctggactggtacaaagccaacaccgacaagaaagagtacgcggcgtctgaagacccaggcgtgatttcagtgactgaaatctacgaatactacaaacagcacggctatgagaccgttgttatgggcgcaagcttccgtaacgtcggcgaaatcatcgagctggctggctgtgaccgcctgaccatcgctcctgcgctgctgaaagagctggcagaaagcgaaggtgctatcgagcgtaaactgtcttacaccggcgaagtgaaagcacgccctgagcgcatcaccgagtccgagttcctgtggcagcacaaccaggatccaatggcggtagacaagctggcggacggtatccgtaagtttgctatcgaccaggaaaaactggaaaaaatgatcggcgacctgctgtaatcattctgcgtgaccgggttcccggtcacgcctctttcccccgcctctgtctgaattttctctctgcgtgtatcattccctttaatcagtactttttgaatggaatggatatgaataccttacgcatcggcttagtgtcgatttctgaccgcgcctccagcggtgtttatcaggataaaggcatccctgctctggaagcgtggctgggcagcgcgctcactaccccgtttgagatccagactcgcctgatcccggacgagcagccgatcatcgagcaaaccctgtgtgaactggtggatgagatgagctgccacctggtgctgacgacgggcggaaccggccccgcgcgccgcgatgtaacgccggacgcgacgctggctatcgccgatcgtgaaatgccgggcttcggtgagcagatgcgccagatcagtctacactttgtcccgacggccattctttcccgtcaggtcggggtgatccgcaaacaggcgctgatcctgaacctgccggggcagccgaagtcgataaaagagacgttggaaggggtaaaagccgaggacggcagcgttatcgtccacggtatctttgcaagtgtaccgtattgtatacaactgcttgacggtccgtatgtggaaactgacggcaacgtggtagcagcatttcgccctaaaagcgctcgccgcgaaacaatctcctgaaattctttaaaatgtgacattagcgccagccgcggtagcgtgtaaatggatttacgatatagtaattttttctttacgattgctgtaaaaaataatccacaacacatgcacaatggttcgctatgtcacataacacccgacctctgaatcgacaggactgcaaaaccctcacgctcgctgccctgggcggcgcgctggagttttacgacttcatcatctttgtcttcttcgccgccgttgtgggggcgctgtttttcccggcggatattccggaatggctgcgtcaggtacaaaccttcggcattttcgctgccggctatctggcgcgtccgctgggcggcattgtcatggcgcactttggcgatctggtcgggcgcaagaagatgtttaccctcagcatcctgcttatggccgtgccgacgctggcgattgggcttttgcctacctatgagtcgatgggcattatcgccccgttattgctgctgctgatgcgtattctccagggcgcggccatcggcggggaagtgccgggcgcctgggtgtttgtcgctgagcacgtcccggtgcgccgcatcggcattgcgtgcggaacgctgaccgcagggctgacgatcgggatcctgcttggctccgtggttgcaaccatcatcaataccagcatgacgcaacaggccgttcacgactggggctggcgtataccgttcctgctgggcggggcgtttgggctggtggcaatgtacctgcgacgctggttgcaggagacgccaatatttctggaaatgcagcagcggaaggcgctggcgcaagaactgccggtgaaaaccgtagtagtgcggcataaaaaagcggtagtggtgtcgatgcttctgacctggctgctgtctgcggggatcgtggtggtcattttgatgtcgccggtctggctgcaaaaacagtacggttttgcgcctgccgtgacgttacaggcgaacagtatcgcgacaattatgctctgctttggttgtctggccgccgggctggcggcggatcgtttcggcgcaagcgcgacctttattgtcggcagtttgcttctggccgcgtcgagctgggcattttatcatcttgcgggcacccatcctgaacagctgttcctgctgtacggtgtcgtcgggctgtgcgtgggcgtcgttggcgccgtaccgtacgtaatggtccgcgccttcccgccggaggtacgcttcactgggatctctttctcttataatgtctcgtatgccattttcggtgggctgaccccgattgtggtgacggtattgatgggggtgtcaccccttgcacctgcgtggtacgtgctggcgttatcgctgatgggactggttttgggggtgtggcttcgccagtcagagggacgtcgtgcccgcgacgcgggcacgacagagggatcagtgtttttcaccaataggtagaatggtgcggtcgaactgctcgttcagcacttcacccatggccaggtagattgcgcttgcgccgcaaaccagacctacccagccggcaacgtgaacgatgccttcgttatccgccaggtgaccgatggccagcagagcgaacagtacggtcaggctcaggaagacgaattgcagtgcgcggttcgccttaagggtaccgaagaacatgaacagggtgaacacgccccacagtcccaggtacacgcccaggaaatgggcgtttgccgcctctgccaggcccattttaggcatcaacagaattgcgaccagagtcagccagaaggaaccgtaagaggtaaatgcggttaagccgaaggtgttgcctttcttatattccagcaggcccgcaaagatctgtgcgataccgccgtaaaaaatgcccatcgccaggataatgccgtccatcgggaacatcccgatattgtgcaggttcagcagaatggtggtcatgccaaaacccatcaggcccagcggagccggattagccaacttagtgttgcccataagtcctcaaaaaaatcatcattaatatggtgaaatggttaaacccgcgccagttctacctgacggggcgcggcatcataatgggcggcatcgacgccgtctatgatctcaccggggtgaaattaaaaaattttttatccttcccccttgatggatgctgttgtgaccccatcttgtaagcaaccgcagtgtgtggacctgaaaaaaatcaaatctgggcagttgaaaaagcacgttctgcccttattacaggtacacaaccacatgttgactgaatttttagtggagacgtttagatgggtaaaattattggtatcgacctgggtactaccaactcttgtgtagcgattatggatggcactactgcacgtgtgctggagaacgccgagggcgatcgcaccacgccttctatcattgcttatacccaggatggtgaaactctggttggtcagccggctaaacgtcaggccgtgacaaacccgcaaaacaccctgtttgcgatcaaacgcctgattggccgccgcttccaggacgaagaagttcagcgtgacgtttccatcatgccttacaaaatcatcgcagccgataacggcgatgcatggcttgatgtgaaaggcaccaaaacggcacctccgcagatctctgctgaagtgctgaagaaaatgaagaaaaccgcggaagattacctgggtgagccggtaactgaagctgttatcaccgtacctgcttacttcaacgatgctcagcgtcaggcaaccaaagatgctggccgtatcgcaggtctggaagtaaaacgtatcatcaacgaaccaaccgcagcagcactggcttacggtctggataaagaagttggcaaccgtactatcgcggtttacgacctgggtggtggtaccttcgatatctctattatcgaaatcgacgacgttgacggcgaaaaaaccttcgaagttctggcaaccaatggtgatacccacctgggtggtgaagacttcgatacccgtctgatcaactacctcgttgacgagttcaagaaagatcagggcattgacctgcgtaacgacccgctggccatgcagcgactgaaagaagccgctgagaaagcgaagatcgagctgtcttccgctcagcagaccgacgtgaacctgccgtacatcaccgcagacgcgaccggtccaaaacacatgaacatcaaagtgacccgtgcgaaactggaaagcctggtagaagacctggtgaaccgttctatcgagccactgaaagttgcattgcaggacgctggcctgtccgtgtctgacattcaggacgttatcctggtaggtggtcagactcgtatgccaatggttcagaagaaagtggctgaattctttggtaaagagccacgtaaagacgtgaacccggacgaagcggttgctatcggtgctgcggttcagggtggtgttctgacgggtgaagtaaaagacgtactgctgctggacgttaccccgctgtctctgggtatcgaaaccatgggtggcgtgatgactccgctcatcaacaaaaacaccactatcccgacgaaacacagccaggtgttctctaccgctgaagacaaccagtctgcggtaaccatccatgtgattcagggtgagcgtaagcgcgcggcggataacaaatctctgggtcagttcaacctggacggtattaacccggcaccacgcggcatgccacagatcgaagtcaccttcgacatcgatgctgacggtatcctgcatgtgtctgcgaaagacaaaaatagcggtaaagagcagaagattaccatcaaggcatcttctggcctgaacgaagcggaaatcgaaaaaatggttcgtgatgccgaagctaacgcggaatccgaccgtaagttcgaagagctggttcagacccgtaaccagggtgaccatctgctgcacagcacccgtaagcaggttgaagaagcgggcgataaactgccagcggaagacaaaactgcgatcgaaactgcactgagcgcgctggaaacgtctctgaaaggcgaagacaaagcggacatcgaagcgaagatgcaggagctggcacaggtttctcagaagctgatggaaatcgctcagcagcagcacgcacagcagcaggcgggcgctgatgcttcccagaacaacgcgaaagacgacgatgttgtcgacgctgagttcgaagaagtgaaagacaaaaaataatcgccctgatgcagggtaagtaatcggcacgggcgtaggagaattctccacgcccgtgctcgcatgttaaggggcttaaaaaaaccaatggcaaagcaagactattacgagattttaggcgttccgaaaactgcggaagagcgtgaaatcaaaaaggcgtataagcgcctggccatgaaattccaccctgaccgtaatcagggtgacaaagaggctgaagccaaatttaaagagattaaagaagcctacgaagtcctgaccgatgcacaaaaacgtgcggcctatgatcagtacggtcacgcggcctttgaacagggcggcatgggcggcggtggatttggtggcggcggcttcggcggcggcgctgatttcagcgatatctttggtgatgtatttggcgatatcttcggcggcggacgtggtcgtcagcgcgcggcgcgcggcgcagacctgcgctacaacatggagctgacgcttgaagaagcggttcgcggcgtcaccaaagagatccgtattccgacgctggaagagtgtgacgtttgccacggcagcggcgcgaaagcggggactcagccacagacctgcccaacctgtcacggttccggtcaggtgcagatgcgccagggcttcttcgcggtgcagcaggcctgtccgcactgtcatggtcgcggtacgctgattaaagatccgtgcaccaaatgccacggtcacggtcgcgtggagaaaaccaaaacgctgtccgttaagatcccggcaggcgtggatacgggcgaccgcatccgtctggcaggtgagggtgaagccggcgagcacggcgcaccggcaggcgatctgtacgttcaggttcaggtgaagcagcacgccatcttcgagcgtgaaggtaacaacctgtactgtgaagtgccgatcaactttgcgatggcggcgctgggtggcgaaatcgaagtgccgacgctggacggtcgcgttaacctgaaaatccccggcgaaacccagaccgggaagctgttccgcatgcgcggcaaaggcgttaaatccgttcgcggtggcgcgcagggtgacctgttatgccgcgtggtcgtggaaacgccggtcggcctgaacgataagcagaaacagctgctgaaagagcttcaggagagttttggtggcccgacgggtgagaaaaacagtccgcgctccaaaagcttcttcgatggcgtcaaaaaattcttcgacgatttaacccgctaacccgctagctggttactatcctttaaagcccggaagcaattccgggctttttgtttataacgttattcctcggttaaactgaatatatacccaatattaatctgtttttaccgatctgtttgcgctgatattatggttttaccgaggtattgttgtaaaagagagtttaaacgtgaaattactacaccgtttctttagcagtgaggcatccggcggcgtcatcctgattattgctgctgcggccgctatgctgctcgccaatatgggcatgacgcgcgatctctatcacgcatttctggaaacgcccgtcgagctgaaagtcggggcgctggaaattaacaagaacatgctgctgtggatcaacgatgcgctgatggcggtgttcttcctgctggtgggtctggaggttaaacgtgagctggtgatcggttcgcttgccagccgtcagcgcgcggcgtttccggtgatcgcggcgattggcgggatgatcgttccggcgttgctctttctcgcgtttgcgtggcaggatccggttgcgcgtgacggctgggcgatcccggctgcaacggatatcgcgtttgcgctcggggtcttagccttgctcggtagccgcgtcccggtagcactgaaaattttcctgatggcgctggcgattatcgatgatctgggcgctatcgtgattatcgcgctgttctacaccagcgatctgtcggttctgtcgctgagcgtggcggccgtggctattgtggtgctggccttgctgaacgtcttcaacgtccgacgtacgggtatttatattctggtgggcatggtgctgtggacggcggtgctgaagtctggcgtgcatgccacgctggcgggcgtcatcgttggcttctttattccgctgaaggagcaggacggcaaatcgccagccagacagctggagcatgtgcttcatccgtgggtgggctttatgatcctgccgctgtttgcgtttgccaacgcgggagtttccctggccggggttactctggacggactcacctccgtgctgccgctgggtatcatcgccggtctgtttatcggtaagccgctgggtatcagcctgttctgctggctggcgctgaagctgaagctggcgtcattgccaaacgggaccacctttagccagattatggccgtcggcgtgctgtgcggtattggattcaccatgtcgatctttatctcgacgctggcgtttggcgcaaacgcgcctgagcttatcgtctgggcaaaactcggcattctcatcgggtcattactggccgcagtcattggttataccttgttgaaggtgaaattgtccggacaggctgtccaggcataacggaaaaccgggaggagggggctccttctcccgatacacactcagggagagaacacgcgatgtctcatttgaattacaaccatctttattacttctggcacgtttataaacagggctcggtcgtgggggcggcagaagcgctttacctgacgccacaaaccattaccgggcaaatcaaagccctggaagagcggttacagggcaagttgttcaagcgcaagggccgtgggattgagcccagtgagttgggcgagctggtgttccgctatgcggataaaatgttcaccctgagccaggagatgctggatatcgtcaactaccgcaaagagtctaacctgctttttgacgtgggggtggcggatgcgctgtccaaacggctggtgagtggcgtgctggatgcggcggtggtggaagatgaacagatccatttacgctgctttgagtccactcacgagatgctgctggaacagctgagccagcataagctggatatgattatttcggattgccctatcgattccacgcagcaggaaggcttgttctcggtgaaaattggcgaatgcggcgtcagtttctggtgcatcaatccgccaccggaaaaaccgtttcctgcctgcctggaagagcgccgcttgctggtgccgggtcggaggtccatgctcggacggaagctgctgaactggtttaactcgcaggggctgaacgtagaaattctcggtgagttcgacgatgcggcgctgatgaaagcctttggcgaagcgcataacgctatcttcgttgctccaacgctgtacgcgcacgatctctattcagacgacaaaataaccgagatcggcagggtggataacgtgatggaagagtatcacgccatattcgccgaaaggatgattcagcatccggctgtgcagcgaatctgcaatcgcgactattcggcgctttttacgccgccggcaatctgaagacataaaaaaacccgcgttaagcgggttctttcaaacaagcaacaacaagtggcgattaagccagtttgttgatctgcgcggtcaggtttgctttatgacgcgctgctttgtttttgtggatcagacctttagcagcctgacgatccacgattggttgcatttcgttaaatgcgttctgcgctgcagctttgtcgccagcttcgatagctgcgtatactttcttgatgaaagtacgcatcatagagcgacggcttgcattgtgcttacgagccttttcagactgaacggcacgtttcttagctgatttgatattagccaaggtccaactcccaaatatgatctatgtggacaattcaaaggccgaggaatatgccctctataccttcttttgtcaatggatttgtgcaaataagcgccgttaatgtggcgacgctacgttacgtagtgatggcgcaggattctaccagcttgtcgttcgtgaatacagcttttcggcgtaaaaatcgcagttcgcggacagatttttttgctgtgaaaggtcagcgtgatgaaatcatacggctttctgtttagcgtgaacaatcgccggttaaccttaaccgctgtacaaggtatactttggcgattttcactgttttgagccagtcatgaagctgatacgcggcatacataatctcagtcaagccccgcacgggtgcgtgctgaccattggtaattttgacggcgtgcatcgtgggcatcaggcgctgttgcagggattgcgtaaagaaggcgaggcgcgaggcctgcccgtcgtggtgatgattttcgagcctcagccgctggagctgtttgcaggcgagaaatcccccgcgcggctgacgcgtctgcgtgagaagttacgctacctggcggagtcaggggtggactacgtcctgtgcgtaaggttcgaccgtcgttttgccgcgctgaccgcacaaaattttgtcagcgacctgttggtcaggcagcttggcgtgcagtttctcgccgtgggcgatgatttccgctttggcgctggtcgtcagggcgatttcttgttattacagaaggctggcctggagtacgggtttgacgtcaccagcacgatgaccttctgtgagggcggcgtgcgcgtaagcagcacggcggtacgtcaggcgctggcgaatgatgaactggacacggcagaaacgctgctgggtcacccgttcacaatttcaggtcgcgtggtccatggcgatgcgctgggccgcacgataggtttcccgacggcgaatataccgctgcgtcgtcaggtctccccggttaaaggggtctatgcggtggaagtggcaggactgggcgagaagcctttctacggcgtcgccaacattggcacacgtccaacggttgccggtgtgcgtcaacagttagaagtacacctgctggacgttgtaatggacctgtatggtcgccatatagatgtgatactgcgtaaaaaaatacgcaatgaacagcgattcgcttcgctggacgaacttaaggcgcaaatcgcgcgagatgaattaacggcccgcgagttttttgggctttagaaccggcttaactgcctacgtgataaatacggaaccgagaatctgatgagtgattataaatcaaccctgaatttgccggaaacagggttcccgatgcgcggcgatctcgccaagcgtgaaccgggaatgctggcgcgttggaccgatgatgacctgtacggcatcattcgtgcagccaaaaaaggcaaaaaaaccttcattctgcatgatggccctccatatgcgaatggcagcattcatattggtcactctgtaaacaagattctgaaagacattatcgtgaagtccaaaggactcgcgggatatgactcgccttacgttccgggctgggactgccatggtctgccgatcgagctgaaagttgagcaagagtacggtaagccgggtgagaagttcaccgccgcagaattccgtgcgaaatgccgcgaatacgctgccacccaggttgacggtcagcgcgctgacttcatccgtctgggcgtgctgggtgactggtcgcatccgtacctgaccatggacttcaaaaccgaagccaacatcatccgagcgctgggtaaaatcatcggcaacggtcacctgcacaaaggcgcgaagccggtgcactggtgcgtcgactgccgctctgcgctggcagaagcggaagtggagtattacgacaaaacctcgccttctatcgacgtggccttcgaagcggtcgatcaggatgcgatcaaagctaaatttggtctgcctggtgtaagcggcccgatctctctggtgatctggaccaccaccccgtggacgctgcctgctaaccgcgcgatctccctctctggcgagtttgagtatgcgctggtgcagattgatggccgtgcggttatcctggcgaaagacctggtcgaaagcgtgctgaaacgcgcgaacatcaccgattacaccgtgctgggcaccgtaaaaggtgacgcgctggaactgatgcgcttcaaacacccgttcctggacttcgacgttccggcgatcctgggcgaccacgtcacgctggaagcgggtaccggtgcggtacataccgccggtggccacggtcctgacgactacaacatcagcctgaagtacggcctggaaatcgctaatccggttggcccggacggctcttacctgcctggcacctacccggcgctggacggtatcaacgtctttaaagctaacgacatcatcgttgatatgctgcgcaccagcggcgcgctgctgcacgttgagaaaatgcagcacagctatccgtgctgctggcgtcacaagaccccgatcatcttccgtgcaaccccgcagtggtttatcagcatggaccagaaaggcctgcgcgcccagtctctgaaagagatcaaaggcgtgcagtggatccctgactggggccaggcgcgtatcgaatccatggtggctaaccgtcctgactggtgtatctcccgtcagcgtacctggggcgtgccgatgtctctgttcgtacataaagagacgcaggagctgcacccgaacactctggaactgatggaagaagtggcgaagcgcgtcgaagttgacggcattcaggcgtggtgggatctcgacgcccgcgacatcctgggcgctgacgcagacagctacgagaaagtgccggataccctggacgtgtggttcgactccgggtctacccactcctccgtggttgacgtgcgtccggagtttgctggtcacgctgccgatatgtatctggaagggtctgaccaacaccgcggctggttcatgtcatcgctgatgatctccaccgccatgaagggtaaagcaccttaccgccaggtattgacccacggcttcaccgtggatggtcagggccgtaagatgtccaaatctatcggtaacaccgtttctccgcaggacgtgatgaacaaactgggcgcggacattctgcgtctgtgggtggcctctaccgactacaccggcgaaatggcggtctctgatgagatcctgaaacgtgctgctgacagctatcgtcgtattcgtaacaccgcgcgcttcctgctggcgaacctgaacgggttcgatccggtgaaagacatggtgaagccggaagagatggttgtgctcgatcgctgggcggtaggctgcgcgaaagcggcgcaggaagatattcttaaagcctatgagtcttacgacttccacgaagtggtgcagcgcctgatgcgcttctgctccatcgagatgggctcgttctacctcgacatcatcaaagaccgccagtacaccgcgaaagcggacagcgtggcgcgtcgtagctgccagactgcgctgttccacatcgcagaggcgctggtacgctggatggcgccgatcatgtccttcaccgcggatgaaatctggggttacctgccgggcgaacgcgagaagtatgtcttcaccggcgagtggtacgaaggtctgttcgacctctccagcactgaagcaatgaacgatgcctactgggacgagctgctgaaagtgcgtggcgaagtgaataaggttatcgagcaggcgcgcgctgacaagaaagtcggtggttcgctggaagcgaccgtgaccctgtacgccgaaccggagctggcggccaaactgaccgcgctgggcgatgaattacgatttgtcctgttgacctccggtgcgaaagttgcggattatgccgaagctactgctgatgctcagcagagtgaactgctcaaaggactgaaggtcgcactgagcaaagccgacggtgaaaaatgcccgcgttgctggcattacaccactgatgtcggtcaggtggcggaacacgcagacatctgcggacgctgtgtaagcaacgtcgccggtgacggcgaaaaacgtaagtttgcctgatgagtaaaactctctgttcaacaggactgcgctggctgtggctggtggtggtggtgctgattattgatttgggcagcaagttcctgatcctccagaatttcgctctgggggatacggtcccgctgtttccgtcgcttaacctgcactttgcccgcaactatggtgcggcgtttagtttccttgccgacagcggtggctggcagcgctggttcttcgcgggtatcgctatcggtatctgcgtcgtgctggcggtgctgatgtaccgctcaaaggccacgcaaaagctgaataacatcgcctacgcgctgatcattggcggcgcgctgggtaacctgtttgaccgcctgtggcacggctttgtggtcgatatgatcgacttctacgttggcgactggcacttcgcgacctttaacctcgccgatagcgcaatatgcgttggtgcggcgttaatcgtgctggaaggcttcttgcctaaaccggccgcgaaagagcaggcgtaacaaaaccagccgggtgacgcgtagcgatcccggcctacagaatttgtggcccccgcaggcccggtaagcgtagcgccaccgggcaacaggtgacccaaaacaagcgagcaatttgcatgtctaaatccgtacagagcaacagcgcggttctcgttcatttcacgctgaagctggatgacggctccacggccgaatccacccgcaacaatggcaaaccggcgctgtttcgtctgggtgacacctccctgtctgaaggccttgagcagcagcttctgggtctgaaagagggcgagaaaaaagcgttttcgctggagccggatgcggcatttggcgtgccaagcccggacctgatccagtatttctcgcgccgtgagtttatggatgcgggtgaaccagaaatcggggcgattatgctctttaccgctatggacggcagcgaaatgcctggcgtgatccgagaaatcaacggcgattctatcaccgtcgatttcaaccatccgcttgccgggcgtaccgttcattttgatgtcgaagtgctggagatcgatccggcactggaggagtaaaatgcagatcctgttggctaacccgcgcggcttctgcgccggtgtagaccgcgctatcagcattgttgaaaacgcgctggagatttacggcgcgccgatttacgtgcgtcacgaagtggtgcacaaccgttacgtggtcgacagcctgcgcgagcgcggtgcgatttttatcgagcagatcagcgaagtgccggacggcgcaatcctcatcttctccgcgcacggcgtctctcaggcggtacgcaacgaggcgaaaagccgcgatctgaccgtattcgatgccacctgtccgttagtgacaaaagtgcatatggaagtggcgcgcgccagccgtcgtggtgaagagtcaattctgattggtcacgccggtcacccggaagttgaaggcaccatgggccagtacagcaacccggaagggggcatgtacctggtcgaatcaccggaagatgtctttacgctggacgtgaaaaacgaagcccgtctgtcgtttatgacccagacgacgctttccgtagacgacacctcagacgtgattgacgccctgcgccagcgcttcccgaaaatcgtcgggccgcgcaaagatgatatctgctatgcaaccaccaaccgtcaggaagccgtacgcgccctggctgaacaggcggatgtggtgctggtggtcggctcgaaaaactcctctaactccaaccgactggccgaactggcgcagcgtatggggaaagcagcttttctgatcgacgacgcaacggacattcaggaagcgtgggtgnnnnnnnnnnnnnnnnnnnnnnnnnnnnnnnnnnnnnnnnnnnnnnnnnnnnnnnnnnnnnnnnnnnnnnnnnnnnnnnnnnnnnnnnnnnnnnnnnnnnnnnnnnnnnnnnnnnnnnnnnnnnnnnnnnnnnnnnnnnnnnnnnnnnnnnnnnnnnnnnnnnnnnnnnnnnnnnnnnnnnnnnnnnnnnnnnnnnnnnnnnnnnnnnnnnnnnnnnnnnnnnnnnnnnnnnnnnnnnnnnnnnnnnnnnnnnnnnnnnnnnnnnnnnnnnnnnnnnnnnnnnnnnnnnnnnnnnnnnnnnnnnnnnnnnnnnnnnnnnnnnnnnnnnnncggtgttaccgcaggcgcttcagcgccggatatcctggtgcaaaacgtcattgcccgcctgcaagagctgggcggtggcgaagcggtgccgctggaaggccgtgaagagaacattgtcttcgaagtgccgaaagagctgcgaatcgacgcccgcgaagtggaataatgtcctctcaatcttcaaaatgccggtggcgaaagcctccggcatttttgtttctggttaactgtgattcaccatcaatattgacgcttttatcactaggttaatcgtttaatctgccatcatgatattgctgttctcctcgggccggagagcgatatgaattcagacatctttttgccacctcagttgacgtgggctaccggcgcgctagccggcgggccgcttatccgcaaaacgactcgtcttgcggatcttcctgggatcttcgcagacggcgaggcgtggaagtgcggcaatcctcaaaaaagtgtgtatgacgtagacgtactgggcttgcccgtaggggaaggggcactcttcgttggggtaactcacctgcgtgcgggtaacgtgggcgatgagttctttatgactcgcggtcattttcatcagcgccgcgaacagggggaggtctattttggcctgcgcggatgtggcttgttgctgctgcaaacggaggcgggcgacgcgcggcttgagcaggtgacggctggctccgtgcatattattcctccttttacagcgcatcgtttgattaacactggcaacgagacgctatcctcccttgccgtctggccgagcattgcgggacacgactatgcggcgctggcagagggcttcaccctgcggatctttgcctctggggaaggttacgaggtgcgccatggctaactatggccttgatatgaccatcacccgtcagccgctcggtttttgctacggagaggatgttaccgggccgatgccggagatcagaacgctggatcagatccgcccgtcgctgcgcaatccggactgcgaagggcctgaacaggtgtatgccatcgcgatggacgtggcgcgtctggcggacaggccggagctcgaaaaacgcatgctgctttttggtgtggtcacctacgcggcaggcacgcttggcgatgagccggtccgcagccagggacatgttcaccgtattagccagcacagcggatggtcgccccctgagctgtacgaaatctggcagggtaaagcgattatctacatgcaggagtatgtggacgacgatccgggacgttgttttgcggtactcgcggggccgggtgaaaaggtactggtccctcccggatggggccatgcgacgatttcggcctcgcccaatgagccgctgacgtttggtgcgtggtgcgatcgggaatatggctttgagtatgaggccgttcgtgcgcgaaaaggtctggcctggtatcccttagttcagggtaatcatattgtctggcagcataacagtcactacagaccagggcgcttgcagatgattacgccgagaagttatccggaatttggcattactgatgcgcctgtttatcagcagtttattgatgaccccgcacggttccagtttatttcgcgtccggataaagtcgcagaactgtggaataacttccatccataaagaagccggggcattgccccggttttcttatcctgcaaacaaaccggacgccacgccaagcgctgccagtataagcagcaatatcatggcttttaccggcgacacgccgcgttttgccatcagataccaggtccccagcaccaccgccagcggaagcagctgcgggaaaataccgtccagcatctgctgaacgtgaatgttaaccccgtcccgggtgatgaactccagcccggtgccgagcttcacgtagctggccgccacgccgcccatgacaaatacgcccagtagcgagagcgcttcccgtagccgggtagatttgctgctgaccagcatctccacggagcctgatcccatctggtagcctttgagaaacaggaaccaggagccagggataatgatggccagccaggcaacggtataaaacagtggaccgaggatatttccgcctgccgccagcgccatcccaatgctaagcaggatcgggatcagcatgccggggatcatcgaatcgccgatcccggcaattggccccatcaggcctaccttcagggtatttatggtttcaccgtcaatcggctcgccgttggcttttttctcctccagccccagcgccataccgttaacgatcgcgccaatctgtggctccgtgttgtagaacgacgcgtgacggcgcagcatctcggtacgttgtaccgggtcgggatagagcttttttgcgaccggcagcatgctcaggcaaaagccgaaggattcaaggcgttcaaagctcattgaggagaggttgtgcatcatccacgctcgccagcagcggcgcagatccttgcgggtgagtttacgttcttccatcagaattcatcctcgtcgtcagggacaggtgctgaagccacggcctgcggtgcctcgggtttatagttgtaatgaatcagtgccagcagggcgcccacgatcaccagcgcgaccatattgagtttcaggaaaacgatgcaaacgaagcccaccagaaagtagatgagcatggtatagcttttgatgatctgcttaagcaggatggcaataccgacggcgggcaagatgccgcccagcacattcatggtggagaggacgatgtgcggcaggctgtccataaacccgctaatgtactgtgcgccaaaaaagacggcgataaaggtaggcacaaagcgcagcacaaaattcatcgcctgcggccagatggcgctgttgaggtagatcccgcgctcgtcgccgttctccagcgccacatccgcacgatggttccagaaggagtttagcaccatcatcgcattgaagagaatggttccggcgatcccaatagtcgccgccagcgcgacggcaacctcaggtcctttgccggaaagtattcccagcgcaatggccggataagccacaaagtttaaatctgctggcatcgagccgccgggtgtcaccattgcgatataaaccgcctgcaccgctacgccaatcataatcccggttttgatatcgcccaggatcaggccaaccagcatcccggaaatgagcggtcgggagatgagataccagccgcccgtcagccctaaaagccacggactactgagtgcgcccagataacacagcaggccaattaaagccgcttcgataatcatgatctgctccttatttcagcttttgtctggcatcctgccaggtataaaaactggcatcaggaaccaggcggaattcaatcgcgtgtccctgcccggtcagccactcgaacgccgccgcttcatcctgggttaccgattgattcgggccgatggtgatcgtgttagcccgggcgctcatcgggcccacgttaatttttccattgctgtttttcaggctaatgcccgcctgctcaatgcgctgtagcgtgagtggagatttgccaatcacgaaatagcgcttttcgctggcaatcacttttggcagtttttcgatcgcggttgccgtatcgaacagccacactttagtatctgatacggctcctttcatgaccgacgataacagcggatcggccgcaacggcatcgtcaatggcaacgatgccgtcgcagggcagctccctggcccagcgtgtaatgagctgcccgtggatcacgcgatcgtcaatgcgtacaaaagaaatactcatatgcggctccttaaaaatcgtctgtctgtgcagtatctgccggtttcgcctgtaccagcgtcggcagagtaatttcgataagctgcccggcagcctgatgaacatcgcgagccatcatcacctcatcggtttgcagcagcatcgggaagttgactccagccaccacggcgaccggcggctgcgtatatgggttaaacgcggcctcacaggccacgttccacggcgtgccgctttgcatgtcgcacagcaccagcacgccgtcagcgttgacgcttgccgcttccagtgtggagatgaaatcctgccggaagccctctattcccgcctgttcggtcagacaaatggcgtgtatgccggggagctcgccgtataccatccggccgctctccagcagcgcggcggctaacggcccatgagtggcgacaataaaatgaatcatcgttagctccttacccaggctttgatagtcgcgagggggtgtccggaagcacgggctgaaggtgaaatgcgataatcacctacgcttgccggaatgatgaaggtttcggcgtaatggacggtaaacggctcaaatgcaccggttgggctgtcgacaattgcttcgtcgccctctaccagattcagcacgttcacgccgccgccggtgtggtgcaaaacgggttcgctaaaccagtggcggcgggtttcgataaattcacgctcgtgcaggccagtacgctcttcacgccagccgtttccttccgcgacaggttcgaactgattcaccagatgctgatgaacccactgcgcgtcgcgctgccagtcgatcaccttttcaccgtgctccaggtggaccgggcgcggcagcccgtccaggcccaggcggccccagtcccacagtttgaaggtgaaaatatacggcgtagcgctgatctccagcaccatggttcccgcgccggagcagtgcaccgtcccagccgggatcaggaaatggtcgtgcttttttgccgggatctgattaacgaagcggtcgtcatcaaacggtttttcaccgcgacccgcgcgcctgagatcgtccatcatggcctcagggtctgtgccggttttggtccccagatagacgacggcacccggctccgcttccagaatgtaataactctcatcctgggtatagtgcatcccaaactgctgctggatgtactcggtaatggggtggacctggaagctcagattctggccacccatggtgtcgaggaagtcaaaacggatcgggaattccgcgccgaaacgtgcgtgaactttctcgcccagcagagcacggggctcaagcaaaaccagatcctgagaggggatctcgatccgcactgcgccaaaacgcagtaacaggctgttctcctcgggcacgcagtcaaaacaccacgcgtaattgggtgcagagggatcgagatcgaattgctgtttcatccactggccgccccagacgccaggatcgaaaaagggcgccacgcggaaaggctgggtggtagtttgcttcagcccggctcgcagggcctcgccgctgaccatcgcgggctggttcgtctgggttgtatccagtaaaaaatcggtgcgcctgagcagcggtgttttgtggcgatcgaagacgcgccattcgacaaaaaaggcgcgcttgtagcgacgaagcatatcttcctgctgattatctgcgccccagttcccagtctcaccccggcgcatacgctgctggatctcccagcgcggcagatcggcatacaccagcacatcacccggatggacaagcgtcgcaccgggtccgtagatcacaatcagccccccggaacactggttcacctgaacctgcaacgcctccagacgcgcgggatcgaaaaactctccaagctggtggcaggagagaacgccaaagacgcgatcgtctgtgaggttgcgcgccagcatctcatgaatggcacactcatcccgtcgcgcctgttcagcattgatcgccagcgtcgggcgtagacgcggcagcacgttctcttcaagctcggtcatgcgcacgcccggatagcagtcaatcaccagcaccgtgcggctgcgctgttgggtttgtgactcaagaacgcgggttattgcttcccagccttgccaggcgctgtcatcaaaaccctgtatcgccaccgtggggaatttgtcgtaggttgtcattgtatcctccgtaatcgttatttaaggttattcgattaaccgtatttgagaagagtggttaacgcgattaacccgccataaatgcgaatcgaatccagaacaacagcggtaatgtgaagagtctcacagggaaaaatgcaaaaaacaggttattcgattaacctatagtgatgatgaaggagacaacatgacgggaattacactggccgatgtcgcgaaacgcgccggcgtgtcaacggcgacggtctcgatggtgctctgcaacaaaggccgcatttcgcaaagcacgcgcgaacgtgtgcttaaggcgctggatgaatccggctatgtctataaccagacggcagccaatttacgtaaccgcagcagtaaccaggtcgggctgctcttgcacgatatcaccaaccctttttatagcgagatgacggcagggctaagtcatgaaatggagcgccacgagctgatgctttttctggcgaatagcgaggaatcggcagagcgacagcaaaaatttgttgattcactgatgcgtaataacgtcggcggtatggtgctgtgtgcggctcgggaaacgccccaggccttttttgagggtctgaagcggcgcaatattccggctatcatggttgtgcgcccgctgaacgatccggattttgattttgtcggaacggataacttcttaggcacgcagatggcgacggagcatctgctcagaatgggccatcggcacattgcgttcattggagggagtcagaattcgggctctcgggcgcagcgtatcgggggctttaccagcaagctgctggaatacggcgtgacgccgaatcctgcctggatcagaacctctcacgccagccaaagcgacggcgcgcgcgtggcagaggcgttacttctcgagcatccacacatcagtgcggcaatttgctatcaggatgttgtggcgctgggggtgatgcaaagcttacgcaagatgggccgtgagccgggacgtgattttgcgctggtcggtttcgatgatattaccgaagcggctctggtgcagcccgcattgaccaccgtatcggtggcggcgaaagagattggtcgtaaggcaggggagttactttacagccgcatacagggcaacgacgaacccgccaaacgaatcattctgccgcctgcgctggtggtgcgggaatcatgtggttttcgctgacgatcatgtctttcactgatatctcaccctgtttatcattaaattctaattatcggcgttttctgtggcagcctgtgcaaaggctggttaatctgaaaacgatttacatcattttaacgtaagagaataactatgcatgatgcacagatccgcgtcgccattgcgggcgcgggcggacgtatgggccgtcagctgattcaggcggcactacagatggatggcgtggcgcttggcgcggcgctggagcgtgaaggttcatcgcttttgggagccgatgcaggcgagctggcaggcgcaggtcagacgggcgttaccgtgcagagcagccttgaggcggtgaaagaagactttgacgtgtttatcgattttacccgccctgaaggcacgttggctcacctggcgttttgccgtcagcacggtaaagggatggtgattggcaccaccggttttgacgaggtcggtaagcaagccattcaggatgcgtccactgagattgcgattgtctttgcggcaaactttagcgtgggggtaaacgtcatgctgaaactgctggagaaggcggcgaaggtgatgggcgaatacaccgacattgaaatcgtcgaagcgcaccatcgccacaaagtcgatgctccgtcaggcacggcgctggcaatgggcgaagcgattgcgtgtgcaatggataaagatttgaaagacatcgcggtctattctcgcgaaggccacactggcgagcgcgtgcctggcaccattgggtttgccaccgttcgcgcgggtgatatcgtcggtgaacataccgctatgttcgccgatattggcgaaaggatcgaaatcactcataaagcatccagccgcatgacatttgcaaacggggcggtacgttcggcattgtggctgaaaggtaagcgtaatggtctttttgatatgcgagatgtcctcgaactcaacaatttgtaagcattattacccttcgtgatgtggttgttgcagtcgtaattacttgattgcatagggcaatattttattgcccttttattttgtctgtttggggtgtttattgtgtctaactgatttaaagtaagtgttttctcgataatttctgttgctgaactgtaaattttgaccatttggtccactttttattcctgcaagacgttcctttctattaaaatgcatgcgcaagcggtttccacagtgatttagttgatctttttgccgcttaatctgagttcagacctccaggcttgcaaaagaatatacaaaactcccgttttaagttgacttttacatggcaaatccccagaatgccgccgtttgccaaaaatccgctggcaacacatttgcattgatccatgacatggttatgaattaatatgcaaataaagtgagtgaatattctctggagggtgttttgattaagtcagcgctattggttctggaagacggaacccagtttatcggtcgggccataggggcaacgggttcggcggttggggaagtcgttttcaatacttcaatgaccggttatcaagaaatcctcactgatccttcctattctcgccaaatcgttactcttacttatcctcatatcggcaatgtcggcaccaatgcggctgacgaagaatcctctcaggtacatgcgcaaggcctggtcattcgcgacctgccgctgattgccagcaacttccgcaacactgaagacctctcttcttacctgaagcgccataacattgtggcgattgccgatatcgatacccgtaagctgacgcgtctgctgcgcgagaagggtgcacaaaacggttgtatcatcgcaggggataacctcgatgcgacgctggcgctggaaaaagcgaaagccttcccgggactgaacggtatggacctggcgaaagaagtgaccaccgctgaagcctacagctggacgcagggaagctggacgctggaaggcgacctgccggaagcgaaaccggaaagcgagctgccgttccacgtggtggcctacgattttggcgccaagcgcaacatcctgcgtatgctggttgaccgtggctgccgcctgacggtcgtcccggcacaaacgtctgcggaagatgttctgaagatgaacccggacggcatcttcctctctaacggtcctggcgacccggcgccgtgcgactacgctatcgacgccatcaaggccttcctggaaaccgatatcccggtattcggcatctgtctcggtcatcagctgctggcgctggcgagcggagcgaacaccgtcaagatgaagttcggccaccacggtggtaaccacccggtgaaagatatcgacaacaacacggtgatgatcaccgctcagaaccacggcttcgctgtggatgaagcgacgatgccggctaacctgcgcgtgacgcacaaatcactgttcgatggcaccttgcagggtatccatcgtaccgataagcctgcgttcagcttccagggtcaccctgaagccagcccgggcccacacgatgccgcgccgctgttcgatcacttcatcgaacttatcgagcaataccgtaagaccgctaaataatcaggagctgagaagaccatgccaaaacgtacagacataaaaagcatcctgatccttggcgctggcccgattgtcatcggccaggcctgtgaatttgactactccggcgcgcaggcgtgtaaagccctgcgtgaagagggttaccgcgtcatcctcgtgaactctaacccggccaccatcatgaccgacccggaaatggcggatgcgacctacatcgagccgattcactgggaagtggtacgcaaaattatcgagaaagagcgtccggacgcggtgctgccgaccatgggcggccagacggcgctgaactgtgcgctggagctggagcgtcagggcgtgctggaagagttcggcgtgaccatgatcggtgcgaccgccgacgcgattgataaagcagaagaccgtcgccgcttcgacgtggccatgaagaaaatcggcctcgacaccgcacgttccggtatcgcacacaatatggaagaagcgctggccgttgcggctgaagtgggttatccgtgcatcatccgtccttccttcaccatgggcggcaccggcggcggcattgcctacaaccgcgaagagtttgaagagatttgcgagcgcggcctggatctctccccaaccaaagagctgctgattgatgaatcgctgattggctggaaagagtacgagatggaagtggtgcgtgataaaaacgacaactgcatcatcgtctgttccatcgaaaacttcgacgcgatggggatccacaccggcgactccatcaccgttgcgccagctcagacgctgaccgacaaagagtaccaaatcatgcgtaacgcctcgatggcggtactgcgtgaaatcggcgtggaaaccggcggctctaacgtgcagttctcggtgaacccgaaaactggccgtctgattgttatcgaaatgaacccgcgcgtgtcccgttcctccgcgctggcctccaaagccaccggcttcccgattgcgaaagtggcggcgaaactggcggtgggttataccctcgacgagctgatgaatgacatcaccggtggccgcacccctgcgtccttcgagccgtccatcgactacgttgtgaccaaaattccacgctttaacttcgagaaatttgcaggcgcgaacgaccgtttgaccacccagatgaaatccgttggtgaagtcatggcgattggccgcacgcagcaggaatccctgcaaaaagcgctgcgcggcctggaagtgggcgcgaccggctttgacccgaaagtcagcctggacgacccggaagcgctgaccaaaatccgccgcgagctgaaagacgcgggcgcagagcgtatctggtacatcgccgatgccttccgcgcgggcctgtccgtcgacggcgtatttaacctgactaacattgaccgctggttcctggtgcagattgaagagctggtgcgtctggaagagaaagtggcggagctgggcatcaacggcctggacgcagacttcctgcgcatgctgaagcgtaaaggcttcgccgatgcgcgtctggctaagctggcgggcgtacgtgaagcggaaatccgcaagctgcgtgaccagtatgacctgcacccggtttacaagcgcgtggacacctgtgcggcagagttctcgaccgataccgcgtacatgtactccacctatgaagacgagtgcgaagcgaacccgtccgtcgaccgcgacaagattatggtgctgggcggcggtccaaaccgtatcggccagggcatcgagtttgactactgctgcgtacacgcctcactggcgctgcgtgaagacggttacgagaccatcatggtcaactgtaacccggaaaccgtttcgaccgactacgacacctccgaccgcctctacttcgagccggttaccctggaagacgtgctggaaattgtgcgcattgagaagccaaaaggcgtgatcgtgcagtacggcggccagaccccgctgaagctggcgcgcgcgctggaagcagcaggcgtgccggttatcggcaccagcccggatgcgattgaccgtgcggaagaccgcgagcgtttccagcaggcggttgaccgtctcaaactgaaacagccggcgaacgccaccgtgaccgcaattgaaatggccgttgagaaagcgaaagagatcggctacccgctggtggtgcgtccatcctacgtactgggcggccgcgcgatggaaatcgtctacgacgaagcggacttgcgtcgctacttccagacggcggtgagcgtttccaacgatgcgccagtgctgctcgaccgcttcctcgacgacgcggttgaagtcgacgtggatgccgtctgcgacggcgaaagggtgctgattggcggcatcatggagcacatcgagcaggcgggcgtgcactccggtgactccgcctgttctctgccagcgtacaccctgagccaggagattcaggacgtgatgcgccagcaggtgcagaagctggccttcgaactccaggtccgcggcctgatgaacgttcagttcgcggtaaaagacaacgaagtctatctgattgaagtcaacccgcgtgcggcgcgtaccgtaccgttcgtctccaaagcgaccggtattccgctggcgaaagtggcggcgcgcgtgatggctggccagacgctggctcagcagggcgtcacgaaagaaattatcccgccttactactcggtgaaagaggtggtactgccgttcaacaaattcccgggcgttgacccgctgttagggccagagatgcgctctaccggggaagtgatgggcgttggccgtaccttcgcagaagcgtttgcgaaagcgcagctgggcagtagctccaccatgagaaaatctggccgtgcgctgctctccgttcgcgaaggcgataaagagcgcgtggttgacctggctgccaagctgctgaaacagggcttcgagctggacgccactcacggtacggcgattgtgttgggtgaagcgggtatcaacccgcgtctggtgaacaaagtgcatgaaggtcgtccgcacattcaggaccgcattaagaatggtgagtacacctacatcattaacaccaccgcaggtcgccaggcgattgaagactccaaactgattcgccgcagcgcgctccagtacaaagtgcattacgacaccaccctgaacggcggtttcgcgacggccatggcgctgaatgcggatgccaccgagaaggtgatttcggtgcaggaaatgcacgctcagattagcaagtaacacacattgcccggtgccatccggttaccgggcaattttcccatcttaagaaccttctggtttttcatccgctttcagtcagttagcctaaaatagttaggtcgataacgaaaattcaactgagagcaagggaaaacaccatgcaaaataaactactgatcgcttccgttctggctgccaccgcaatgttcaccgtggtgggctgttcgtccaatcaggccgtaaaaaccaccgatggcaaaacgattgttactgacgggaaaccgcaggtggatgacgataccggtctggtatcgtacaaaaacgccgaaaccggtcaaactgaacagattaaccgtgaccaggttaaatcaatgggcgagctggataactaaaaaaaagcagtggcacatgccactgcttttttgcttcaggatgctcgattaccagcgatggtttaacaaaatatgaccgccgtaggcggcatagctgttttcaccccactcgccgctggcacgcagggagatcgtcgtggtttcgttcaggttgccggttaagcccaactctaactgaccacgatcttccggcgtatcgttgctgacggtctcgtcgttgaatgccagatcgttttgaccagcacctttcaaccagttaaccgcaacgtacggctgccaggccttgacgtccttctgctggaagtagcttgctttaacgccgagacgaccaaagacgctgtcattgtccagggtagtgacgcgtacgccgtcgcgatcggtatgattttcctgatcgagatagctgtagatcacctgcgcctgcggctcgatcttccaggtgcgttcattttcagactggatgatccacgcgtggccgacttcaacagacgcggcgaaaccttcactatcgtagtcttcatcgttgcgattgctggtgacgttgttgttgtaccagctgtaagcggcccaggtatcaacgtagctgcccagacgtaatttctgatcttcctgccaggtcgcgtacagcccaacattgaagccatcaaccttaccctgtgcgtcacgtacgttgtgcttcgcatcagagtgggtcttcgcctggcctgcaccgaacatcccgccagcacgcaggataccgttatccattggcttgctcatgaaatcgctgccgacttggagtacggtggtggtggtgtcgtagctgactttatcgccacccgcatcgttctcgtgatagcgacccttaacgtacatccaggtgttcaggtcgtcttcattgcggaaggtgatctggtcgcgatcgtcacgcttatgcaggaacatgccctgtgcggcaaggtagttacctaagtaagcacccacttcaggtgccatgacttccggcgtattattaccgccgttgtcagtgttgccgccgttatcggtgttaccgccgttgtcagtgttgccgccgttgtcggtgttgccaccatcatcggtgttgccgccattgtcggtgttgccgccgttatcggtgttgccgccgttgtcggtgttatcgccatcatcagtattgccaccgtcatcggtgtcgtcggaaggctcatcagaaggcgtcgcctttgattccagataccagttgccgtcactgtgctggtagaggttatattcccaggcgcctgcgacgaccggttttgccagcgtcagttgggcttcggaactgccgccgatgctgacaatttccataccgttaatagtttgcgcgcctgcgccgccaatgttggtgatgctgatgccggactgaccgaagctgctgcccgtaatagtgaggtgatcagttggtgaattatcttcacccagggtgctgttcatcacgatctggctaccgtcagagccggtgtagtcgccattaatcgtaaaattattgccaacgctattattagccgcactgagtaacagcgtgccgccattagtcacgttgccgttgatggtatcgacgccggaagcgctgagcgtggagttaccctggactgcattccatgccgccagcgtaccgccgctaagaaccgcgatgttgttgttcacttcgcctgcggtggcaaaggtcgcgccattttcaacggtaacggtggcgttactgcccttgacgccgagcgttgcgccggtggagaccagcgtggtgccgccgtgcagaaccgtatcccctgtatagctatttttgcccgtcagggtcagggtgttggaatcaactttttcgacgttaccgctaccggtcatgtcggtggcgaaagtgaaatcgcttccctggttaaaaatgacggtaccgttgttggtgagcccaccgctgagggtcgcggttttttcgccatcgcccagttgcaacgaagcatctttggccacccgagtattaccggtattcgataccgcgcctgacagggttaacgtgcccgtgtctatcagcaaggaatcgccagagccaataatatcgagatcgcccgacagcgcccaattttcgccgttcattgtgacgctggcaaagccgtcgtcttcattcagaccaacaaagttactgtcttccgaacccgtgccgatcaacgtcagggtatttcctctggaatttgtggatattacgtcaccgatgaggttggagccagtgtcgagcagtagcgtgttatttttatcgctggcaaacataatagcgtttgtttcaccactaatcgttccgctatttttgatatctaattttgctgtatcttttacattgattccgtactgagttccctgcacagtggcactgttaaaaatcttagtgttaccatcatttgccgtaatagcatcaccgtttgtaccgataatttcgccactgttattaatgccaataccaacctgagtactaagacctgtttttccttttatcgttccggtgctggtattggtaatatttactgcggaggagttttcactgacaaaaatgccattttccgagccagtaatgtttccactattattaaaatcaccgagtactgactgaatattcaccgcattcgcggtggtggaggaaatggttgcgccgatgtcgttattaattacaatgcgctgtacaccagtatttatattcaggccatttcccgtgccagaaatattcccattattagtggcgttagtggtagtaaacccagtgacagataccgccgcttcactatctgcggaagatatcgtcacgtctttatttataacatattcagcatcggctgagaaatcttgaggaacagaagttgattggtcaatcgttgcagaaaacgcaaccgcaggggtgcatatcaacaaggcaggaaatatctttcccagagttttggttgtattatttaattgggagggtttgttgctcatgtacacatccatttgagtgagaaggaatattcgacacgtgtgtgaaacgtatatcgaccgcctaaataatgagctcaaaacaaagagcgtaaaattattattttttcaatgggttatgtacagactgttttattaaagaatgacttaaggtcctctaaaaatatctgttggcaatatgagttgttactattattttgcggcatgaatttgtcgtacgcgtcgttttctttctttagcgccgtaatcgctgttaaggtggtgatgattgccaatacttgcgttttactttgaagcgtaagatggcctctttaagtcggggtggtaactgtctacactcattgctacaagaaaagtaaaagacgggcatatacatgattctgataatttatgcgcacccctatccgcagcactcgcatgcgaataagcggatgcttgagcaggcaaggacgcttgaaaacgtagagatacgttccctctatcaactctatcctgatttcaatatcgatgtcgccgccgaacaggaggcgctctcccgtgccgatctgatcgtcttgcagcatccgatgcagtggtacagcacgcctccgctgctgaaattgtggatcgacaaagttttctcccacggttgggcatatggacacaacggcaacgcgcttcagggcaaaagcctgatgtgggctgttaccaccggcgggggggaaagccactttgagattggcgccttccccggatttgacgtgctggcgcagccgctccaggctactgccctttactgcggtctgaactggcttccgccttttgcgatgcactgtacctttgtctgcgacgatgaaaccttgcaggcgcaggctcgtcactacaaacaacgtttacttgagtggcaggagacgcacaatggatagccatacgctgatacaggcgctgatttacctcggcgcggcggcattaattgtgcccgtggcggttcgtctggggctgggctcggtgctcggctatctgattgccgggtgtgtgattggcccctggggctttcggctggtgacggatgccgagtcgatcctgcattttgcggagatcggcgtggtgctgatgctgtttgtgattggtctggagctggatccgcagcggctgtggaaactgcgcgcctcggtgtttggcggaggcgccctgcaaatgctggcctgcggtctgctgttgggcgggttctgcattctgctggggatggagtggaaagtcgcagagctgatcggcatgacgctggcgctctcctcgacggcgattgccatgcaggcaatgaacgagcgtaatctgacggtgtcgcaaatggggcgcagcaccttctccgtactgttgttccaggatattgccgctatcccgctggtggcgatgatcccgctgctggcaaccagcggcgcatcaacgacgctgggggcatttgccttatcagcgctgaaggttgccggtgcgctggcgctggttgttctgcttggtcgctacgtaacgcgtccgctgctgcgctttgttgctcgctctggcctgcgcgaagtattcagcgccgttgcgttattcctggtgtttggttttggattgctgctggaagaggccgggctgtcgatggcaatgggcgccttcctcgcgggggtcttactggcaagctccgaataccgtcacgcgctggaaagcgatatcgagccgtttaaaggattgctgctggggctgtttttcatcggcgtcgggatgtctatcgacttcgggacgctggtaacccatccgctgcgcatcatcattctgctggtgggtttcctggtcattaaaatggcgatgctgtggctgattgcccgcccgttaaatgtgccaaaaccgcaacgccgctggtttgccgtgctgctggggcaggggagtgagtttgctttcgttgtctttggcgcagcgcagatggcaaatgtacttgatccggaatgggcaaaagcgctgacgctggcggttgcgctgtcgatggccgcaacgccgatcctgctggtgctgctgacgcgtctggagaaaacgggaagcgaacaggagcgagaagccgatgagatcgacgaagagcagccgcgggtgatcatcgccggatttggccgattcgggcagattactggccgtttactgctctccagcggagtcaaaatggttatcctcgatcacgatcctgaccatgtcgatacgctgcgtaaattcgatatgaaagtgttttacggtgatgcgacccgagttgatctgctggaatccgccggggcggcgaaagccgaggtgttgattaatgccattgacgatccagagaccagtatgcagatggttgagctggttaaagagcattttccacatctgaccattatctcccgtgcgcgcgatgtggatcactacatccagctgcgtcaggcgggtgtggcagcccctgaacgtgaaaccttcgaaggggcgctcaaatctggccgcatggcgctggaaagcctggggcttggcgcgtatgaggcacgtgagcgtgccgatctgttccgccgttttaatcatgagatggtggaagagatggtggcgatggcgagcagtacggcaaccgaacgcgctgcggtgtttaaacgcaccagcaccatgctgacggagatcatcaacgaggatcgtaatcatctgtcgctggttcagcgccacggctggcaaggaacggaagagggcaagcatactggtgatcctgcggatgaaccggagagtaaaccctctgcgtgaagtggagttgccagcaatattaaaaaatttctaattctttaccctgccgccagtcgacgaaagattaagctttccgtatagtggcggcaatttttgcatccgggaaattttcaatgatcagtctgattgcagcgctggcggtagaccgcgttatcggcatggaaaacgccatgccgtggaacctgcctgccgatctcgcatggtttaaacgtactacgttaaacaagccggtagtgatgggccgcctgacctgggagtcgattggtcgtccactgccgggtcgtaagaatattgtgatcagtagccagccgggcactgacgatcgcgttcagtgggttaagtccgttgatgaagcaattgccgcctgcggcgatgccgaagagatcatggtgatcggcggggggcgtgtgtatgagcagttcctgcctaaagcgcagaaactgtatctgacgcacattgatgcggaagtggaaggggatacccatttcccggattacgatccggacgagtgggagtccgtattcagtgagtttcacgatgcggatgcgcagaactcacacagctactgcttcgaaattctggaacgtcgttaacggttttatcctctccccgaagggagaggataaacatcttcaggaggcgactgcctcaccctcgcctaagtccagctgtcgattggatggctgcacaaagtaagttttatcttcccagcgtaagcaggttaaatccccgccccagcagcatccggtatccagcgcatagatattttccggggtgccttttccttccagcgatgcccagtggccaaataccacactgtattcgtttgtcacggggcccggaatcgcaaaccatggcttaagcggcgcaggggcattttcaggcgtatctttgcaatacatatccagttgcccgttcgggaagcagtagcgcatccgcgtaaaagcattggtgataaaacgcagtcgtgccaggccgctgaggtcatcactccagttatttggcatgtcgccgtacatcgcatcaaggaagaacgggtaggagtcgctcgccagcaccgcttcggcgtcgcgcgcgcaggtttttgccgtctcaagatcccactgaggcgtgatgccggcatgcgccatcaccagttttttctcttcgtcaatctgtagcagcggctggcgacgcagccagttgagcaactcatcggcatccggtgcttccagcaggggggtaatgcgatctttcggcttattacggctgatcccggcgtatacggccagcagatgcagatcgtggttgcccagcaccatgcgcacgctgtcacccagcgatttgacatagcggaggacgtccagggaaccgggaccgcgcgccactaagtcgcccgtcagccagagcgtgtcctgcccgggggtgaagtcgacctgttttaataatgcgatcagttcatcgtagcaaccgtgaacgtcgccaatcagatatgtagacattagattaatgaataagtgtaggtacggcgagacggaatacgggaatagcaatgcggaaagcattgccgtcggcatcgaccatttcataatggccttgcatggtacccagcggcgtttcaattaccgcgccgctggtgtactgatactcttcgccaggggcgatatggggttgttcaccgaccacgccttcgccctggacttcaatttcacggccattgccgttggtgataagccagtagcgcccgagcagttgcacaggcatccgccccagattgcgaatggttacggtataagcaaagacaaaacgttcttcatccggtgtggattgggactcaatgtagacgctttgaacctgaacacagacgcggggcgaatcaatcatggcttagctctccttcggcggcgcattgtcgctgatgtaattagccagcttgcagtactgctctacggaaatattttccgcacgcattgccgggtcgatgcccaactcagctaatacgtcaacggtaaacagattgccaaggctgttacgaatcgttttacggcgctggttaaaggcttctgtcgtgatacggctcagcacgcgcaggtctttgaccgggtacggcatcgttttatgtggcaccaggcgcacaaccgcagaatctacctttggcggtggcgtgaatgcggaaggcggtacttctaataccgggatcacgttgcagtaatattgcgccatcacgcttaaacgaccatacgctttactgttcggccctgcaaccagacggttaacgacctctttttgcaacatgaagtgcatgtcggcaatggcatcagtatagctaaacagatggaacatcagcggggtggagatgttgtacggcaggttaccgaacacgcgcagcggctgtcccattttttctgacagttcgccaaagttcatggtcatcgcatcctgctgataaatcgtcagcttcggcccgaggaacgggtgcgtttgcagacgcgcggccagatcgcggtcgagttcgataacggtcagttcgtcgaggcgttcgcctaccggctcggtcagcgcggcaagacccgggccgatttcgaccatggcctgacctttctgcggattaatggcagaaacgatactgtcgatcacaaactgatcgttgaggaagttttgcccgaagcgtttacgggctaagtggccctgatggactcgattagtcattgagtattaacaatcattttgatggcgagattaagcgccgtaataaaactgccgacatccgcttttccctggcctgccagatccagcgcagtaccgtggtcaacggacgttcgaataaagggtaaaccgagggtgatattcaccccgcggccaaagccctggtattttagcacgggcagaccctgatcgtggtacatcgcgagtacggcgtcggcattatccaggtatttgggctggaaaagggtgtcggcaggcagaggcccgctgaggttcatccccttcgcccgcatctcctcaagcaccggaatgatggtgtcgatctcttcggtgcccatatgtccgccctcacccgcgtgcggattcaggccgcaaaccagcacatgcggctgcggaatgccgaatttggtttgcagatcgtgatgcaaaatgccaatgatctcacgcaggagttcaggcgtaatggcatccggaatggctttgatcggcaggtgcgttgttaccagcgcaacgcgcattgcttcggttgccagcatcatcaccactttcgggctgtgcgaacgctcttcgaaaaattcggtatgcccggtaaacggaatgcccgcgtcattgatcacgcctttatgcaccggaccggtgatcagggcggcaaattcgccctgaaggcaaccgtcacaggcgcgcgccagcgtctcgacaacgtagtggccgttttcggtgtgtaactcaccggggacaacaggcgcacggagcggaacagaaagcagggtgagagtccccgcctgctgcggtgcgggctgttggccttcaacgtaagggaggagcgttaaaggcagaccgagcaaagctgcccggtcttgtaacagtgttgcatctgcgcagacaaccaactctaccggccagctgcgctgggcgagctgaaccacaaggtcaggcccaatcccggcgggttcgccgggggtgatcacaacacgatgcggtttcatcagttgctcaacacttttacgtaagcgctggcgcgttgttcctgcatccaggttgcggcttcttcagagaacttacggttaaacagcatgcgatacgcacggtctttctgcgccgcgtcggttttatccacgttgcgcgtgtccatcagctggatcagatgccagccgaaggaggagtgcaccggcgggctcatctggcctttattcagcttcattaacgcatcgcggaaagccggatcgtaaatatccgctgccgcccaacccaggtcaccgccctggtttgcagagccaggatcctgagagaactcttttgccgctttatcgaaggtggttttaccgctcttgatgtctgccgcgatctgttccagcttcgcacgagcctgatcgtcagtcatgatcggagacggcttaagcaggatatgacgcgcatgcacttcggtaaccgaaatgttctggctctggccgcgcaggtcgttcactttcagaatgtggaagcccacaccggaacggattggaccgacgatgtcgcctttcttcgccgtgctcagcgcctgggcaaacagggatggcagctcctgaatacgcccccagcccatctggccgcctttcagcgcctgctggtcagcggaataggtgatcgccagcttgccgaagtcatcgccattacgcgcctgctcaacgatagcgcgcgcctggctttccgcctcagccgcctgatcggaggttgggttttccggcagtgggatcaggatgtggctcaggttaagctcggtgctggcatcattctgattccctacctgttttgccagggcatccacttcctgaggcaggatggtgacgcggcgacggacttcattgttacgcacttctgaaatcagcatctctttacggatctgattacggtaggtggcatagctgatgccgtcgtaggccaggcggctacgcatctgatccggggtaatgttgttctgctttgcaatgttggcgatcgcctgatcgagctgctcgtcagagatcgtcacgcccattttctggcccatctgaagaacaatctgatccatgatcagacgctccaggatctggtggcgcagcgtagcgtcatccggaagctgttgacctgcttcgcccgagttgagctttacagatttcatcaaaccgtcaacgtcactttcaagcacgacgccgttgttaaccacagccgcgactttatcgacaacctgtggggccgcgaagctggtattcgcaaccatagcgacaccgagtagcagcgttttccagttcttcatactttttccatttcaattaaccgcaaagcggattacgttgtaaatcaagcacattannnnnnnnnnnnnnnnnnnnnnnnnnnnnnnnnnnnnnnnnnnnnnnnnnnnnnnnnnnnnnnnnnnnnnnnnnnnnnnnnnnnnnnnnnnnnnnnnnnnnnnnnnnnnnnnnnnnnnnnnnnnnnnnnnnnnnnnnnnnnnnnnnnnnnnnnnnnnnnnnnnnnnnnnnnnnnnnnnnnnnnnnnnnnnnnnnnnnnnnnnnnnnnnnnnnnnnnnnnnnnnnnnnnnnnnnnnnnnnnnnnnnnnnnnnnnnnnnnnnnnnnnnnnnnnnnnnnnnnnnnnnnnnnnnnnnnnnnnnnnnnnnnnnnnnnnnnnnnnnnnnnnnnnnnnnnnnnnnnnnnnnnnnnnnnnnnnnnnnntgaactacgatacggcagaatgttcgagcgcagcatctgctgcgtgcccagaccgtagttagaactcaggccgcgcaactcgatattaaagccgatcacgttatcatatttgccctgactgttttgcgtatcccagccgttaagtttgcgttcgtaaccgacacgtattgcgtaacagcaggagttgtattgcagacccagcatctggtcagcaggtttttgggcattcgtgtcatagtagtaggccccgacgactgaccaacgatcggcgatcggccagctcgcggcggtacccacctgtgaaataccgtctttgtattggtctgtattcgcatagtttggcagcgtcgcctggatatactccgggctggcgtaacggtacgtcaactgcaacatgcggtcttcatcacgacggtattcgatggctgcgctgcccgtcgcgatattgtccagtcgtgtatcgtactgaacaccaccgcgcagaccccaacgatccgtcatgcgccagtaggtgtcgcccgcccataccagtgagcccgttttgttgtctttctcccagttaatgtcgtcatcaccggtacgagactcggtgaaatagtagatttgaccaacagaaacgttaaaacgttcaacggcagcatcatcatatacgcgcgttgtgacgccagtcgttaactggttagcagacgcaatacggtcaagcccgccgtaggtacggtcacggaacaggccgctgtagtctgattgcaggaaggaagagtcgtagttttgaattttgctctgatcgcgataaggcacatacagatactgcatacgcggctcaagcgtctgggtgtatccatcggcgagaaggcccatatcacgttcgaagatcagcttcccgtccattttgaattgcggaagcgtacggtttaccgactcttcaagatcggtgccatagcgtttgttataccagtccagatttttctgctggtagtgggtggccatcagcttagcttcggtattcaggctcgcccagtcgtttgaccacggcagattgatcgtcggctcgatatgcagacgcgttgattccggcatatccgagttggtgttgacgaaatggaccgcctgagcataaacgcgcgtgtcgaaaggacccacatcgttctggtaccagttcacgtccagctgcggctcggcaccataggtactacgcgattgtgtatcaaatacctggaactgtttggtcgacaccgtcgcgtcaaagttctcaatggcgtagcctacgctgaatttctgcgtggcgtaaccgtcggtactggagccgtatttagaatcaaagtcgttgaagtaatacggatcgctgactttggtgtagtcgatgttgaagcgccacacctgatccaataccccggcgtgcttccagtagtacatccagcggtgcttatcaccttcgctcggatgctcgtcctggaacaccttatctgatggcagataatcaaattccatcaggcccgcgcccgccttggtcagatagcggaattcgttctcccacatgatgttaccgcgcttatggatatagtgcggcgtgatcgtggcgtccatgttgggcgcaatgttccagtagtacggcaggtagaactcaaagtagttcgacgtgctgtacttggcgttcgggatcaggaaacctgaacgacgtttgtcacccacaggcagttgcaggtaagggctatagaaaatgggcaccgggccgagtttaaaacgggcgttccagatctctgcaacctgttcttcacggtcgtggatcacttcactgcccacaacgctccaggtatttgaccctggcaaacaggaggtaaacgtgccgttttcgagaatggtgtagcggttttcgccgcgctgcttcatcaggtccgcggtaccgcgcccctgacgaccgaccatctggtaatcaccttcccagacgttggtgtctttggtattcagattcgaccaggctttcggacctttcaggatgacctgattgtcgtcatagtgcacattacccagcgcatccaccgtacggacaggcgcctgagcaccttccggttgcttctggtgcaattgcacttcgtcagcaagcaggcgactgtttccctggttaatatcgacattgcccgtaaaggtcgcattgtcaggataattaccttttgcgctgtcggcattaatggtgacgggtaagtcattcgtatcgcctttcaccagtgggcgattgtaacttgggacgccaagcatacactgcgaggcgagatcggctgcgagcccctgttggctatacagggcggtgccaatcattgtggccagaagggtggggatacgttttttcatacgttgtattttattgttccgtcatcagtggctacggcttacaaacgctcagagactatcttactcatcagcgcagtaccagcgttaatcctgcccgtttgcgcgccagagtgttaggctcgctatcgaatgacgagtatgataatgcaaattataggcgatgtccctcaattgaccgtggcgcgaccactgtaatgatggcgttgcgtcggccaggaacatgaccattcggggagtatatgcagtattggggtaaaataatcggcgttgcgttcgcaattattatgggtgccggattctggggtgtcgttcttggcctcattatcggccatatgtttgataaagcacgcagccgcaaaatggcctggtttgccaaccagcgcgagcgccagtcactctttttctccaccaccttcgaggtgatggggcacttaaccaaatcaaaaggacgcgtaacggaagccgatattcaggtggccagcgtctttatggatcgcatgaatctgcacggcgaatcccgcatcgcggcgcagaatgcgtttcggattggtaaatcagatcactacccgctgcgtgaaaaaatgcggcagttccgtagcatctgtttcgggcgttttgatttaattcggatgtttctggaaattcaaatccaggccgccttcgcggatggctctctgcatccgaatgaacgggacgtcctgtatgtgattgctgaagagttgggcatttcccgcatgcagttcgatcagttcctgcgcatgatgcagggcggcgcgcactttggcggcggttatcagcagcaatcgtccggcggcggctggcagcaggcgcagcgtggccctacgcttgaagatgcctgtaacgtcctcggcgtgaagccgtctgacgatgtcacgaccatcaaacgcgcctatcgtaagctgatgagcgagcaccatccggataagctggtggcgaaaggcctgccgccagagatgatggagatggcgaaacagaaagcgcaggaaatccagaaagcctacgagctaattaaagagcagaaaggttttaaataaaaaaatggcccgacagtgccgggccattttttcagaagtccaccggggctttgaacgtcatggcgttgccgaaagcagggtgggtgatggtgagcgtctgcgcatgcagttgcaggcgcggcgctaacgccagcgcttccggcggcgcatagaatctgtcccccagaatggggtgacccatcgcaagcatatgcacacgcagctggtgggagcgcccggtaatcggcttcagcaggacgcgcgcggtgttatccggcgcgtactccagcacttcatactcggtttgcgcggccttgccggtttcgtaacacaccttctgctttggccggttcggccagtcgcaaatcagcggtaaatccaccagcccttccgcctgcgccggatggccccagacgcgcgcgacatactgtttcttcggctcgcgctcgcggaactgacgcttcagctcgcgttctgccgctttattcagagccaccacaatcacgccgctggtcgccatatccagacgatggaccgactcggcctggggataatcacgctggatacgcgtcatcacgctgtctttatgctcttccagacgccccggcacggataacaagccgctcggcttgttaaccaccataatgtgctcgtcctgatacagaatgaccagccacggatccatcgggggattgtagggctccattaccatcttgcgctccgcttactgatgcgtcacaacgataagacgcagggcgtcgagacgccatcccgcctgattcaggctttccagcacctgctggcggttgctctcaatggcggccagctcatcgtcacgaatgttagggttcactgctttcaacgcttccagacgcgacagctcggcagaaagcttctcatcggcttcgctacgcgccgcatcgatcagcactctggccgctttttcggcctgggcttcacccagttgcagaatggcatgcacgtcctgctgcaccgcattcaccagcttactgccggtatggcggttcaccgcgctcagctgacggttgaagctttcaaactccacctggccggccaggttcgtaccgtttttatccagcagcagacgcaccggagttggcggcaggaagcggttaagctgaagctgtttcggcgcctgcgcttccacaacgtagatcagctccaccagcagcgtgcccacaggcaaggctttgttcttcaacagggagatggtgctgctgccggtatcgccggagaggatcagatccagaccgttgcggatcagcgggtgctcccaggtgatgaactgtgcatcttcgcgggaaagcgccacatcacgctcaaaggtgatggtgcagccgtcttccggcaggcccgggaaatccggcaccagcatatgatcggacggggtcagcacgatcatgttctcgccgcgatcgtcctggttaatgccgacgatgtcgaacaggttcatggagaagctgatcaggctggtgtcatcgtcctgttcttcgatactttcggccagctgctgcgctttttcaccgccgttggagtggatctccagcaggcgatcgcgaccctgctccagctgagctttcaacgcgtcgtgcttctctcgacaggatttgatcagctcatcaaagccctcggtgttttccggcgccgcgaggtaaccgatcagatcgctatgcacctggtcataaatggtgcggcccgtcgggcaggtatgttcaaacgcatccaggccttcgtggtaccagcgaaccagaacggactgggcggttttctccagatacggaacgtggatctgaatatcgtgcgcctgaccgatacgatccagacggccgattcgctgctccagcagatccgggttaaacggcagatcgaacatcaccagattgctggcgaactggaagttacggccttcagaaccgatttcggagcacagcagaacctgcgcgccgctgtcctcttcactaaaccacgccgcagcgcggtcgcgctcgataatagacatgccttcatggaacacggcggcgcgaataccttcgcgctcgcgcagcacttgttcaagttgcagggcggtggctgccttggcgcagatcaccagcaccttccgggaacggtgcgcggtcagataacccattaaccactccacgcgcggatcgaagttccaccaggtgccagtgtcgccttcaaattcctgataaatttgctccgggtagagcatatcgcgcgcgcgatcttccgctgatttacgggtgcccataatgccggagactttaatcgccgtctggtactgggtcggcagcggcagtttgatggtgtgcagctcgcgtttcgggaagcctttcacgccgttacgggtgttgcggaacagcacgcggctggtgccgtgacggtccatcagcatgtcgatcagctctttacgcgcagatcccgcattatcgctgtcgctgttcgcggcctgaagcagcggctcaatatcctgctcgccgatcagatcgctgagggtgttaagttcatcattagagagacgattaccggccagcagcagcgcgacggcgtccgccaccggacggtagtttttctgctcttcaacaaactgctcaaaatcgtggaatcggttcggatcgagcaggcgcagacgggcgaagtggctctcaagacccagctgctccggggtggcggtcagaagcagaacgcccggtacgcgctcggcaagctgctcaatcgccatgtattcacggcttggcgcatcttcgctccagacgaggtggtgcgcttcgtcgacgaccatcagatcccattctgcgtcgcacaggtgctccaggcgctgcttgctgcggcgcacgaagtccagggaacaaatgaccagctgttcggtttcaaacgggttgtccgcgtcgtgctgggcttcggcatagcgctcgtcgtcgaacagggagaagcgcaggttaaagcggcgcagcatctcgaccagccactggtgttgcagcgtttccggcaccacaatcagcacgcgctcggcagcgccagagagcagctgctggtgcaggatcatgcctgcttcgatggttttacccaggcccacttcgtcagccagcagcacgcgaggcgcatggcgacggcccacgtcatgggcgatattcagctgatggggaataaggctggtacgctggccgcgcaggccgctccacggcatgcggtactgttcactctggaacttacgcgcgcggtagcgcagggagaagcgatccattcggtcgatttgcccggcaaacagacggtcctgcggcttgctgaaaaccagtttgctgtcgagcagcacttcacgcaggataacattcgtctcgtcggtatcaagacgcgttccaatgtaggcgagcagtccattctcttcttttacgtcttcaaccttcagctgccagccttcgtggctggtcacggtgtcgcccggattgaacattacgcgggtaacaggggagtcattgcgagcgtacaggcggttttcaccggtagcagggaaaaggagggtaaccatgcgcgcatcgacggcaacgacggttcctaatccaagttcgctttctgtatcgctgatccagcgttgaccaagtgtaaaaggcatagttgttcggctctaatctttaattgcaggcaatagttcgaccccgtcaaaaaagacggtcatcgaaaaatgggtccgggaatggaaagggcgctatggtactggatggcaacggtttcgtcacgcgtcaaaatagcccaagttgtcctgtcactagtgtagcaaagtcgtcattgatgaacggtaaaattccctccgcaaccggctgaagctggcgggtcaggtagtgatcgtaatcaagcggagactgctggtaatcaacgggttccgggccgttagttgtccagacgtatttgatcgtaccccggttctgatactgcggcgcacggccccggcgaacattctcttcatccgccagccgcgcggcgcgtacgtggggaggaacgttacgttgatattcggccagcgggcggcgcaggcgcttgcgatacaccagctggtcatccagttcacccgccatcaggctggcgatggtgtcgcgcacgtagtcctgatacggctcgttgcgaaacacccgcaggtagagcgtctgctggaactgctgcgccagtggcgtccagtcggtgcgcaccgtctccagccctttaaacaccatccgctgcgtgtcaccttcctgaatcagcccggcgtagcgcttcttgctgccctggtcggttccgcgaatggtcggcattaaaaagcgggcaaaatgggtttcaaactccagctctaacgcgctggttaaccgctctttttgcaaattttcgcgccaccagtcgttcacgtaggcgaccagttctttgccgatgcgcgcggcgtcgtcttctgaatgggccgctttcagccagacaaaggtggagtcggtatcgccataaataacgtcatagccccgggattcaatcagcgctttggtctggcgcataatgtcgtgcccgcgcatggtgatggaagacgccagccggggatcaaagaagcggcaggcgctggtacccagcacgccgtaaaaggcgttcataatgattttcagcgcctgtgagagcggcttgttgccgtggcgtttcgcctcgtcgcggccgtgccagatgtttcccacaatttcgggcaggcagtgttttttccgcgagaagcgagctccaagaaacccttcggtgctgtgcgcatcgtctggctgggccatcccctccaccagccccaccggatcaatcagaaatgtgcggataattgacgggtacaggcttttataatccagcaccagtaccgagtcatacagtccgggccgtgaatccatcacgtaaccgccggggctggcctgcggcggcacgtcgccgagattaggggcgacatagcccgcccggtgcatccgcgggaaatagaggtggctgaaggccgctaccgagccgccgtgcctgtcgaccgcgagaccgttcaccgttgcgcgttccagcaggaacggcatgatctcggttttgtggaagatctgcgtcaccagctcgcaatctttcaggttataggtagcgagcgccggtttatcctcgttaaagcgccggtcgatctcgtccattcggtcccagggattgtcgatggatttaccttcgccgagcagttcctgggcgaccgcttccagcgagaaggaagagaagttccagaaggcggatttcagtgcctcgatgccgtcgataatcaggcgaccattggcctgtgcaaagaatacgccgttcttaaaaccgtgctcacgccactccagctcgctgttgccgcgccccagaatcagcgggatacggtaacgctcggcatgtttttgcagcacgcgcaggtcaaactgcaccacgttccagccgatcagcacgtccgggtcgtgctcggcaaaccactggttaagcttctccagcagttgcgggcggctgttgacgtactccagattaaaatccagcgcggacgcatcgccgttcggcggcccgagcatatagacaacccgctgcccacagccttccagaccaatgcagtacagttcgccgtggcgggtggtttcaatatccagcgacacccactttagcggcgggcgatagtgcggattaggcttcaggcgcgcgttaacgatcctgccgttttgcgcggtgccatctacccagacgggggcggtgataaaccgctccatcagaaagcgttcaggcgggcgaatgtcggcctcgtaaagcgtcacgcctgcttcacgaagcagcttttcatagcgcatcaactggcgatgggcgcggcagtagaggccgtaaaccggctggcggtggaaatctttcagttggagcggcgtaaggcgccagttgttttcgctgcgtagcagttgtttcactttctcgacgtgagcttcaggaataaaggccacggactcctgcggcgggagcgtaacgtttagtgggccgttgtccgttgccagccagaattcaacctcagtaccctgaggggtatcccgccagtgtctggtcagtaaaaagccttcttgcgcctgcgtcacgccgatatcccataaaacaaaaccaggcctgattatagcctggttgaggggtgtttgctggggttttatacagtgcccgttccgccggatggcgctgcgcttatccggcctacaggttccgcaggcccggtaagcgcagcgtcaccgggcaagggtttactgcccgtagtaggctttcgcaccgtgcttacgcaggtaatgcttatccagcagggtttgctgcatatccggcagctgcggtgccaactggcggcagaagatccccatataggcgacttcctccagcacgatcgcgttgtgcaccgcgtcctccgcgtttttaccccaggcaaacgggccgtgggagtgcaccagcacgccgggcatttgcgccgcgtcgattccctgtttttcgaaggtttcgacaatcacgttccccgtttcccattcgtactcaccgttgatctccgcatcggtcatcagacgcgtgcagggaatggtgccgtagaagtagtccgcgtgggtggtgccggtggccggaataggctggcccgcctgcgcccagatggtcgcgtgacgcgaatgggtatgcacaatcccgccgatggtcgggaaggcctgatacagcaggcgatgagtgggcgtatcggaggagggctttttattgccttcaaccacttcacccgtttcgatgctgaccaccaccatgtcttctgcggtcattaccgtgtaatccacgccggaaggcttgatcacgaacacccctttttcccggtcaacggcgctgacgttgccccatgtcagggttacgaggttatgttttggcagcgccaggttggcttcgagtacctgacgtttgagatcttctaacattgtcgtctcctgccggatggcgctgcgcttatccggcctacagaaccgtaggcccggtaaacgaagtgccaccgggcactccgtacttagcgttttgaaccgtaatagacttcgttccagcgcagcgcgtctttaaaggctggcagacgggtgtcgttatcaatcacggtcagttcgatgtcgtgcagctcggcaaactgacgcatatcgttcaggtcaagcgcgtggctgaatacggtgtggtgcgcgccgccggccaggatccaggcttccgaggcggttggcaggtcaggctgcgctttccacaaagcgttggcgaccggcagcttcggcagagaatgcggggtttcaaccgcatcgacgcagttcaccagcaggcggaaacgatcgccgaggtcaatcaggctggcgttaatggccgggccggtacgggtgttgaagatcagacgggccggatccgctttgccgccaatgccgaggtactgcacgtcgaggatcggtttctcttcaaccgcgatggatggacacacttccagcatgtgcgagccgagcaccagatcgttgccgttctcgaagtggtaggtgtagtcctccataaaagaggtgccgccctgtagaccggtcgacatcaccttcatgatgcgaagcagagcggcagttttccagtcgccttcgcccgcaaagccgtagccctgctgcatcagacgttgtaccgccagacccgggagctgtttcaggccgtggagatcttcaaaggtggtggtgaaggcatggaagccgccctgttccagaaaacgcttcatgcccagctcaatacgtgcggcatccagcacgttctggcgcttgtcaccgttgacctgtgccgcaggcgtcaggcgatagctgctttcgtactcgtccaccagcgcgttaacgtcgccatcgctgatgtcattcaccacctgcaccaggtcgcccaccgcccaggtgttgacggagaagccaaatttaatctgcgcggccactttatcaccgtcggtgaccgccacttcgcgcatgttgtcgccgaaacgcaccactttcaggtggcgggtatcctgcttagataccgcctgacgcatccaggagccaatacgtttttgtgcctgaccgtcctgccagtgcccggtcaccacggcatgctgttgacgcatgcgcgcgccgatgaagccgaactcgcggccgccgtgcgcggtctggttcaggttcatgaagtccatgtcgatgctgtcccacggcagggaggcgttgaactgcgtgtggaattgcagcagcggtttgttgaggatagccaggccgttgatccacattttggctggcgagaaggtgtgcagccacaccaccaggccagcgcatttgtcatcgtaattggcatcgcggcaaatgttggtgatttcgtccggggtggtacccagcggcttcagcaccagtttgcacggcagtttggcttccgcgttcagcgcattcacaacgtgctccgcgtgtttcgtcacctgctgcaacgcttccggtccgtacaaatgctggctgccaatcacaaaccacacttcataattattaaaaatggtcattatcgtgtccttaatgtgtcagggttgccgtagtgtccgcggtgcttttggccggggcggcgacagggagatagtgaagttcggcgctttttgcccattgctggtagcgctgataaagctgttcaaagcgttgtgcctgctgagtctgcggctggagcgtactttcgacggcgctcgccatatgctgttgcgcggtcgggatatccgcatggacgcctgcggccacggcagcgaaaatcgcggcgcccagcgcacagcactgatcggaggccacaatttgcagcggccggttcagcacgtcgcagcaggcctgcataatcaccgggtttttacgggcgatgccccccagcgccatcacgttgtttacgtcaatgccctgcccggtgaagcactccataatggcgcgcgcgccgaatgcggtggcggcgatcaggccgccaaacagcgcgggcgcgtcggtcgcgaggttgagatcggtaatcacccctttcagacgctggttggcaaacggcgtacgacggccgttgaaccagtccagcaccaccggcaggtggtcgagagacggattttttgcccaggcttcggtgagctgcggcaggagctgttttttgctcgccgtaatctgcgttttcagttcaggatgcgcggcagccagctgatccagcggccagccgagcacgcggccaaaccaggcgtagatatcgccgaaggcggactgacccgcttcgaggccgataaaatcgggtaccacgctgccgtcaacctgaccgcaaatgcctttcaccgcgcggtcgccgacgctggctttatctgccgtcagaatgtcacaggtggaggtgccgataactttcaccagcgtgttgggctgcgcacccgcgcccaccgcacccatatggcagtcgaacgcgccgccggaaatggtcacgttttgcggcagaccgaggcgtttcgcccactcttcgcagagcgtgccgaccggaatatcggcggtgaaggtgtcggtaaacagcgggtatgtcaggtttttgttgatgatcgggtcgagttcatcgaagaacgctgccggaggcagacccccccagctttcatgccacagcgatttatgcccggcgctgcaacggccacggcggatatcctgcgggcgagtggtgccggagagcagggcgggaacccagtcgcatagctcaatccatgatgccgctgcctgtgcgaccggcgcgtccgcgcgggtaacgtgcaggatcttggcccagaaccactcgctggagtaaattccgccgatataccgtgagtagtcagttttgcccggctgatggcataagcgggtgatggcttccgcctcttccacggcggtatggtctttccacagcacaaacatggcgttcgggttgtcggcaaactccggtcgcagcgccagtacgcggccttcggcatcgacaggggcaggcgttgagccggtgctgtcgacgccaatccccacgacatcggcccgctgggcgtccgtcaactctgccagcacggttttgatcgccgcttccattgattcaatgtaatcacgcgggtggtggcggaactggttgttcggcgcatcgcagtagcgcccctcttgccagcgcggataccactcaacgctggttgctatctccaggccagtcgtacagtccactgccagcgcgcgaactgagtcgctgccaaaatcgaggccaattgcaattgccatggtgttgctccatccaaaaaacaggtatggaagaacattagagactggggacaaaaatcgtcaggcaggatccgctaatcttatggactaaattgctgtagccacgcaaagtgtgatgccgtgcaaatattctatgtggacatttctgccgcacttatagacacttttgttactgcttatctgcccgtactggcggagaaatcagggggaaaggctgaaacatggcggacgtaaaagaggcgtgatgctttttggatcttttcgcgggccatttttatactgcttttatcgatatggacaattggtttccttcaggacccttgggagaactgaatctatggccgaaccgcaaaacgatcccttactgccgggctactcatttaacgcccatttggtggcggggctgacgccaattgaggccgagggatatctcgatttttacgtcgatcgccctcttggcatgaagggatatatcctgaacctgaccgtacgcggagaaggggtcgtcaaaaacggggatcagcagtttatctgccgccccggtgatatgctgctgttcccgccgggggagatccaccactacgggcgccatccggatgccaaagagtggtatcaccagtgggtctatttccgtccgcgcgcctactggcaggagtggctctcgtggccggccattttcgcccataccggtttatatcgcccggatgaggcgcatctggcgcagttccgtgagctgttcgcacagattattgaggcagggcaggcgggcgggcgctacgccgaactgctggccatcaacctgcttgaacaggtgctgctgcgccgcatggaggccatcaacgagtcgcttaatccgccgctggacaaccgcgtccgcgacgcctgccagtacatcagcgaccaccttgccgacagccagtttgatattgccagcgtcgcccagcatgtgtgtctgtcgccgtcacggctctctcatctgttccgccagcagcttggcgtgagtgtactcagctggcgtgaggatcagcgcatcagccaggcgaaactgctgctcagcaccacccgaatgcctatcgccaccgtcgggcgtaacgtcggctttgaagatcagctctatttctctcgcgtgtttaagaagtgcaccggtgccagcccgagcgaattccgtgcgggatgtgaataatcggtaaacattcaggtgaacttcaggcgcatcttgtaaactattcagacaattgatgccttgacgcggtgcagggcgctaagcagaatcgctgattcgttttctgaccggaatagttatgcaggcattgctggaacattttattacccagtccgttatgtattcgctcatcgccgtggcgctggtggcgtttctggagtcgctggcgctggtcgggctgatcctgcccggcaccgtgatgatggcggggcttggggcgctgatcggcagcggcgaggtcaatttctggcaggcgtggatggccggtattattggctgtttgctgggggactggatctccttctggctgggctggcgctttaagaagccgctgcaccgctggtcgttcatgaaaaaaaataaagcgctgctggataaaaccgagcacgcgctgcaccagcacagcatgttcaccatcctcgtggggcgcttcgttggcccaacgcgcccgctggtgccgatggtggccgggatgctggatctgcccgtcgcgaagtttgtggtgccgaacatcatcggctgcgtcttctggccgccgttctacttcctgccggggatcctggcgggcgcggccatcgatattcctgacggtatgcaaagcggtgagttcaagtggctgctgctgggaacggcggtcctgctgtggctggcggtctggctctgctggcgcctgtggcgcagcgcgaaagccagtgttgatcgcctgacgcgctatcttccgcgctctcgcctgctctggctggccccgctgacgctgggagtggctgtcgtggcgctggtggcgctgattcgccacccgctgatgccggtgtacggtgagatcctgttgaaggtggtgagccgttaaacgccgggcggcactgcgtttgcccggcctacggtcttatacccagtaatcctgacgcgctttctttcccgctcattaaggcgtcggttgttccatcccacaaaatacgtccctccgcgatcactaccgatcgcggcgcgatgcgtgcggcatcttcgatgctatgcgaaaccatcagcatcgtcagttgctcgcgctcgcaaacctcctcaaccagcgagagcatctcctgacgcagggccgggtcgagcgccgaaaagggttcgtcgagcagcagcagcggctgcttgcgcaccagacagcgtgccagcgccacgcgctggcgctggccgccggaaagctcacccggtagtctgttgataaacgcagccaggcccatttgttcggcgatcgcctccagcgtctgacgctgcgcaacactgagttttaaccccggatccatacccagcgcgatgttctgccacaccgtaagatgattgaacagattgttttcctggaacagcatcgacaccgggcgcttagccggcggagcgtaggtatattcgccattattaatgacgatcgacccgctggcaggctgcaaaaaaccggcaatcagattgagcagggtactttttccggccccgctggggccaagcactgcgattcgctctccctgacgaacggagagggtaaaacgcattggcaggtgctcataaagccaggttacatcagtcagttttaacatcacgccccggaagtttttcgataacggtaaataacgcaaagcacagcaccagcagtaaaagtgccgtgacggcgccgtcctggctacgataggagccaatttgctgataaagccagaatggcagcgtgcggaaatcctcgttgccaaagagggccacaacgccaaaatcgccaatcgacagcacgcaggcaaacgccagcgcctgagccagcggacgctttagcgcgcgcagttcgaccaccttcagacgctgccagccctgcatgcccagcgactgacacagcaaactgtagcggctgttgacgtcgcgcatcgggttttccagcaccttgagcgcgtaagggatagccatcagcgcgttggtaaaaatgacgatgccgtcggcgctttccggcaggccgatggtgctgttgaacagtaaaaagaatccggtcgccagcacaatacccggcatcgccaggatcagcatacccgtcagttccagcgcgtgtccggctttacgggcatgacgcgcgtacagctcgcggctgctccagagcagcatcatggtcaggatcacgcacagcagcccggctgccagcgcgatgcgcaatgaggtccacgtcgcctgccacaggacaggctgttgcagtaccgacaacacattgcgattcaggccatcaacgannnnnnnnnnnnnnnnnnnnnnnnnnnnnnnnnnnnnnnnnnnnnnnnnnnnnnnnnnnnnnnnnnnnnnnnnnnnnnnnnnnnnnnnnnnnnnnnnnnnnnnnnnnnnnnnnnnnnnnnnnnnnnnnnnnnnnnnnnnnnnnnnnnnnnnnnnnnnnnnnnnnnnnnnnnnnnnnnnnnnnnnnnnnnnnnnnnnnnnnnnnnnnnnnnnnnnnnnnnnnnnnnnnnnnnnnnnnnnnnnnnnnnnnnnnnnnnnnnnnnnnnnnnnnnnnnnnnnnnnnnnnnnnnnnnnnnnnnnnnnnnnnnnnnnnnnnnnnnnnnnnnnnnnnnnnnnnnnnnnnnnnnnnnnnnnnnnnnnnnnnnnnnnnnnnnnnnnnnnnnnnnnnnnnnnnnnnnnnnnnnnnnnnnnnnnnnnnnnnnnnnnnnnnnnnnnnnnnnnnnnnnnnnnnnnnnnnnnnnnnnnnnnnnnnnnnnnnnnnnnnnnnnnnnnnnnnnnnnnnnnnnnnnnnnnnnnnnnnnnnnnnnnnnnnnnnnnnnnnnnnnnnnnnnnnnnnnnnnnnnnnnnnnnnnnnnnnnnnnnnnnnnnnnnnnnnnnnnnnnnnnnnnnnnnnnnnnnnnnnnnnnnnnnnnnnnnnnnnnnnnnnnnnnnnnnnnnnnnnnnnnnnnnnnnnnnnnnnnnnnnnnnnnnnnnnnnnnnnnnnnnnnnnnnnnnnnnnnnnnnnnnnnnnnnnnnnnnnnnnnnnnnnnnnnnnnnnnnnnnnnnnnnnnnnnnnnnnnnnnnnnnnnnnnnnnnnnnnnnnnnnnnnnnnnnnnnnnnnnnnnnnnnnnnnnnnnnnnnnnnnnnnnnnnnnnnnnnnnnnnnnnnnnnnnnnnnnnnnnnnnnnnnnnnnnnnnnnnnnnnnnnnnnnnnnnnnnnnnnnnnnnnnnnnnnnnnnnnnnnnnnnnnnnnnnnnnnnnnnnnnnnnnnnnnnnnnnnnnnnnnnnnnnnnnnnnnnnnnnnnnnnnnnnnnnnnnnnnnnnnnnnnnnnnnnnnnnnnnnnnnnnnnnnnnnnnnnnnnnnnnnnnnnnnnnnnnnnnnnnnnnnnnnnnnnnnnnnnnnnnnnnnnnnnnnnnnnnnnnnnnnnnnnnnnnnnnnnnnnnnnnnnnnnnnnnnnnnnnnnnnnnnnnnnnnnnnnnnnnnnnnnnnnnnnnnnnnnnnnnnnnnnnnnnnnnnnnnnnnnnnnnnnnnnnnnnnnnnnnnnnnnnnnnnnnnnnnnnnnnnnnnnnnnnnnnnnnnnnnnatcgtagacaaacgcaaagtaaccgtaatacaaagggaacgaaggtgtcgtttttccagccgcccggtacgttgacggcatctgccgccaaaccgcttttggcgaacagtctggtttgggtggcggcttccagcaggttgttatccagcccgagcaccacgtcggctttgctgtttttgccttccatgcgcagacggttgagcagcgagacgccatcttccagcgccacgaatttcagctcgcagttgcagtcggcttcaaaggctttttttaccaccgggccggggccccagtcggcggagaaggagtcgtaggtatagaccgtcagaacgggcttagcaaaaacaggcagcgcaaacagcgccagcagaggaagaacgttttttaacactttgcacctcagggttgagtggcaaaggattttgagagacagcctcaaatcccttcgccggcgttatccggatcaggttcgacgggtattatctcagcgcacatcagtgatgcagcaccccgttgagaacggcgctattgtaatgatttggtgaatattacgaaagcgttatggctccggcggcgcaaaccaggcggatttaaaatcaaaccagccgagggtattcatccgcaggccgcgcatgctgcgctgcccctggatcagcagccagtggtgaattaacggtacgatcgtctgcccggtcagtaattcctgacaccaggcggccagatccatttctcctgcccgccaccgcgcggcgtcctgctgccagtcccggttgatacagtgctgaatcaggggcacctcgtacaggtgagaaaagagcgagaaatcaagcggcagcgtaaagtttgcgctgttgagccagatatcgctgatgacgtctccgcgatgccattcatcataatcgacttcctgaatcgccagcgtcacgccttcggctgccagcagcgtgctcatgatcctcgccagaaaacggtgctcaatgtgatcgcgatagtagctgagggtgatgatctccagtccggcaggcttttcactgcggacgggctgcgcatggtgccagcgtgggagcaggccataggccgggaaccaccaggtctggtattgctcctctgcgtgataaatcaggttagcgggcgccagaatatggcttatccacctgcggacgtcgtggtttgccccgcgatggctgcggctatcaaagagcaggtagtagcagccctcctccaggcggctttcgaacgccttttcaccggctgttggcccttccagggtcaggcctgcgctcagctcttcgttgagatccggtaacacccagacgttcacttcgtcgatcaacgccctatagccaaagtaatcatcaaaggcgcggatcttcagctgattactgttatttcgtgtaacggagtaggggcccgtaccaatcggctggctggaaaaattgttcagggatcgccactcggcaggcaggatcattgatggcacgtagcccagaagccacggaagccatttgtccggctgcgaaagctcaatatcaagcgtccaggccgttggagagtggatccgtgcgatatgcgaatagagcggcagcgtgcgggcgcgctctaaagaggcgataacgtcgcgcatctccagctcgcgtccatggtggaaatgaatgccggggcgtagaaagaagcgccagtgcagcggagacacctgttgccagtgatgggcaatatccgcttccagttccccgttttcctcatttatccgcgtcagaccgctgaatatctgccgggccatgtgggtttcagagcgacgtaacgccgtaccgggcaacagatttttcattgggcggtagtaaagtacccgcagaatgtggcgtccctgacgaaagctgcgtcccagatgcgagaccagcatctggcgcacggcggctttgtcgcccaccagctggaccagctgatcgatgcggtcctgctccagcagatcctccgctcgctgttgctgtaacgccaggccggtataaaggaaagtcaggcgcgaacgcttgccgcgtccggcttcggcctcccagtttagccagccctgctgctgcatggtattaaggagcgtgcgcatatgacgccgggagcagttgaggagctcggccagctcgttcagcgtggtctcctgcgattgcccctcgcagcactgccagaggcggataaattgttgttgcagacgaccggaaggcataaaaggggaactcctgacaaaaaatcagcaatttattaatccctatattaagccaataatccttttcgatgaagcgaggaggtaaattatgaagaggtctaccgcacgtcagttttatcagcactatttttcagcgacaaagggagtgtcctggctggcccgccagtgcgcagagcagcggctgagaatactggaagatctgatgcagtgggacgttacgaaaccgacctcttctcgctaactcgcctcgatcatgtgtgactgagtattggtgctaatcacccgccagcaaaatgttttttgctggcttttttcgtttactatttcacccaatttcgattcgctttcataaggacttgcgcatgctctggttgatgacgatggggcgacgcctgaatggcgtgtacgccgcttttatgctggtggccttcatgatgggcgtggccggcgcgctacaggcgccgacgttgagcctgtttctcagccgcgaggtgggggcgcagccgttttgggtgggtctgttctacaccgtcaacgccattgccgggatcctcgtcagcctgtggctggcgaaacgatccgacagccagggcgatcgccgcaagctgatcctcttttgttgcgccatggccgtgggcaacgcgctgctgtttgccttcaaccgccattacctgacgctcattacctgcggcgtgctgctggcctctctggcgaacaccgccatgccgcaactgttcgccctggcccgggagtacgccgacagctcggcgagggaagtggtgatgttcagctcggtgatgcgtgcgcagctctctctcgcgtgggtcatcggtccgccgctggcgtttatgctggcgctgaactacggcttcaccaccatgttttccatcgcggcggggatttttgtcatcagcctggcgctgatagcctttgcgctgccatcggtggcgcgcgtagagcaggtgacggacaagcccatcacgcaggtgagcggctggcaggataaaaacgtccgcatgttgtttatcgcctccacgctgatgtggacctgcaacaccatgtacattattgatatgccgctgtggatcagcagcgatctgggactgcccgacaagctcgcgggtattctgatgggcaccgctgccgggctggagatcccggcgatgattctggcgggttactacgtcaaacgtttcggaaagcgtcggatgatggtcgtcgccgtggcggccggggtactgttctacgcggggctgatcctgttccattcgcgtgaagccttgctggcgttacagctgtttaacgcggtgtttatcggaatcgttgccgggataggcatgctctggttccaggatttaatgccggggcgcgcaggctccgcgaccacgctgtttaccaacagtatctctaccggcgtgattctggcaggggtgattcagggggcgctgtcgcaaagctatgggcatgcatccgtgtactgggtgatcgcagcgatttcgctcgtcacgctgatgctgacgtgccgggtaaaagacgtttgattctggaaggcggcttcacgaaatgaaacgattttctgacaggcgcagagaaggcgcatagagtgcgtgacgggtgcttgaggctgtttgcctcaggctttcgcaagaggcaaacagtggagagtcccacatcaaaaaactgatggggagaccaacttcacaaccaacattgcgaggttagtctcttcattgccgaaaagcaataaggaggctggaatgccaaaacgtactctgctgttaggtttgtttctgatctgtacgacgctgttgatcttcacctggatggtgcgcgactcgctgtgtgagctgcacttcagacaggagaaaacagagctggcggcagtgttggcttacgaagcaaaacgttagcagtattggcggggagttttccccgccactccagagtggttgagcctcaacgcacccttatcaatggcccgcgccctgcgggccattgcctttaacccataaacgcaggctgttttttctcgtaagcggagatagcctcttcgtgttgcagcgtcaggccaatgctatccagaccgttcagcatgcagtggcggcggaacgcatcaatgctgaagctgtagatcttatccccggctttcaccacttccgcttccagatccacctcaaacgaaatccccggattcgcctgcaccagcgcaaacagttcatcgacctgttcgtcactcagcgtcaccggcagcagctggttgttgaagctgttgccgtagaagatatccgcgaagctcggggcgataaccaccttaaagccgtagtcggttaatgcccagggcgcatgttcacgcgacgatccgcagccaaagttttcccgcgccagcagaatggaagcccctttgtattccggaaagttcaggacgaattccgggttcggcacttcgcctttatcgtcgaggaaacgccagtcgttgaacagatgcgcaccaaaacccgtgcgcgtcactttctgcaaaaactgcttaggaatgatcgcgtcagtatcgacgttagcggcgtccagagggacaacccggcccgtatgttgggtaaatttctctgccatgattgtctccttatttcaggctgcgaatatcggcgaaatgaccggtgactgccgcagcggcggccattgccgggctgaccaggtgggtgcgcccaccgcggccctgacggccttcaaagttacggttgctggtggaagcacagcgctcgcccggattcaggcggtcgttgttcatcgccagacacatggagcaacccggcaggcgccactcgaagcctgcttcgataaagatcttatccagaccctccgcttccgcctgggctttcaccggaccggagcctggcacaaccagcgcctgcacgcccggcgccactttgcggcctttagcgatttctgccgcagcgcgtaaatcttcaatacgggagttggtacaggagccaatgaatactttatcaatgctcacgtcggtcagcggtacgccgggtttcagccccatgtaagccagcgctttttccgcactggcacgttcgaccggatcggcaaaggaggccgggtcaggaatactgtcgttgacggaaatcacctggcccgggttggtgccccaggtgacctgcggggcgatttcttccgcctgtaacgtcacaacggtatcaaaaattgccccctcgtccgttttcagggttttccagtacgctaccgcgtcgtcaaaattctgacctttcggcgcatgcagacgccccttcacatagttgaaggtggtttcgtctggggccaccaggcctgctttggcgcccatctcaatggccatgttgcacagggtcatacgaccttcaatgctcagcgcctggatagcgtcgccgcagaattccacgacgtgaccggtgccgcctgcgctgccggttttgccgataatcgccagcacgatatctttcgcggtgatacccggcgcagctttacccttcacttcaatcttcatggttttggcgcggccctgcttcagggtctgcgtcgccagaacgtgttcaacttcagaggtcccaatcccgaacgccagggcgccaaatgcgccgtgcgtcgcggtgtgggagtcaccgcagacgatggtcatgcccggcagagtaatcccctgctcaggccccattacgtggacgatgccctgataggggtggttcagatcgtacagctccacgccaaactcgttacagttcttaatcagctcctgcatctggatacgcgccatctcgccagatgcattgatgtctttggtctgggtggaaacgttgtgatccatcgtggcaaaggttttacccggctgacgcaccgggcgcttatgcgcgcgcaggccgtcaaatgcctgaggagaggtcacttcgtgtaccagatgacggtcgatgtacaacagtggggtttcgtttggtgcttcgtaaacaacgtgcgcatcaaacaacttctcatataacgtcttagccatgattacaccccttcagcgacatagcgggcaatgatgtcgcccatttcatcggtactgactgccgccgtgccgcgtgctaaatcaccggtacggacgccttcttctaatgcccggttaatggcgttttcaattgcggttgctgcatcgcctgcatccaggctgtagcgcagcagcagagccagggagaggatctgcgcaatcgggttggcgatgtttttacctgcgatatccggcgcggagccgcccgccggttcgtacaggccaaagccttcttcgttcaggctggccgagggcagcatgcccatggagccggtgatcatcgcgcattcatccgagagaatatcgccgaacaggttggagcacagcagcacgtcaaactgggacggatctttaatcagctgcatcgttgcgttgtcgatatacatatgtgacagctcaacgtccgggtactgcctggcaacttcactgacgatttcgcgccacaaaatagacgactggagcacgttcgctttatcaatagaggtcactttacggcggcgtttgcgcgctgactcaaacgcgatatgagcgatacgttcaatttcaaaacggtgatacacctcggtatcaaacgctttctcatgctgaccgctgccttcgcggccttttggctgcccgaagtagatcccgccggtcagctcacgcacgcagagaatgtcgaaaccgttggcggcgatatcggcgcgcagcgggcagaactcttccagccccgggtacagcttcgcgggacgcaggttgctgaacagtttgaagtgtttacgcagcggcagcagcgcgccgcgctctggctgctctgctggaggcaggtgttcccacttagggccacccactgagccaaacagcacggcatcggcattttcgcagccttccacggtcgctttcggcagtggcgtaccgtggttatcaatcgcaataccgcccacgtcgtagtggctggtggtaattttcatcgcaaaacgcgaacgtacggcttccagtactttcagcgcctgtgtcatcacttccgggccaataccgtcacccggcaacacagcaatatggtaattcttcgacatcacacggtttccttgttgttctctttattctgagctttgcgttgcaactctttttcgacttcggcggcgcgccagatgttgttcaggacatgcaccatcgctttcgcggaggattcaacgatatctgtcgccagacccacaccgtggaagcggcgaccgttatagttgacgacgatatcaacctggcccagggcgtctttaccgtgcccttttgccgtcaggtcgtatttcaccagctctacgtcgtactcagtgacgcggttaatcgcctggtaaatggcatccacagggccgttaccgttggcggcttccgctttaatttcatcgccgcaggccagcttgacggaggcggtagcgatatcacttgagcctgactgaacggtgaagtagtccagacggaagtgttctggctcttcctgctgtttgttgatgaatgccagcgcttccaggtcgtaatcgaagacctggcctttcttgtcagccagtttcaggaatgcgtcgtacagctgatccatgttgtaatcgctgtcctgataccccatctcttccatacggtgtttcaccgccgcgcggccagagcgcgaggtcaggttcagctgaacctggttcagaccgatggattccggagtcatgatttcgtagttttcacggttcttcagcacgccatcctggtgaataccggaggagtgagcgaacgcgccagtaccaacaatcgccttgttcgccgggatcggcatattgcaaatctggctcacggtctggctggtgcgccagatttcgttgtgattgatgcgagtgtgtacgttcataatgtctttgcgcaccttgatcgccatgatcacttcttccagcgagcagttgccggcgcgttcaccaatgccgttcattgccccttctacctgacgcgcgccggcgtggacggcagcgatggcattgcccacagccaggcccaaatcatcgtgggtgtgaacagagatgatggctttatcaatattaggtacgcggtcgtacaggccggtgatgatgttagagaactcaaacggcatggtgtagccgacggtatccgggatgttgatggttctggctccggcattaatcgcggcttccactacacgggccaaatcgtcaatcggcgtgcggcctgcatcttcacaggagaattcgacgtcatcagtgtagttacgcgcgcgtttaaccatatacaccgcacgttcgatcacttcatccagcgtgctgcgcaacttggttgctatgtgcatgggggaggtggcaatgaatgtatggatacggaaggcttctgcaactttcagggattccgcggccacatcaatatctttctcaacgcagcgagccagaccgcacacgcggctgtttttgatggtgcgggcgatggtctgtactgactcgaaatcacccggcgaggagacgggaaagccgacttccattacgtctacacccatgcgttcgagggccagcgcaannnnnnnnnnnnnnnnnnnnnnnnnnnnnnnnnnnnnnnnnnnnnnnnnnnnnnnnnnnnnnnnnnnnnnnnnnnnnnnnnnnnnnnnnnnnnnnnnnnnnnnnnnnnnnnnnnnnnnnnnnnnnnnnnnnnnnnnnnnnnnnnnnnnnnnnnnnnnnnnnnnnnnnnnnnnnnnnnnnnnnnnnnnnnnnnnnnnnnnnnnnnnnnnnnnnnnnnnnnnnnnnnnnnnnnnnnnnnnnnnnnnnnnnnnnnnnnnnnnnnnnnnnnnnnnnnnnnnnnnnnnnnnnnnnnnnnnnnnnnnnnnnnnnnnnnnnnnnnnnnnnnnnnnnnnnnnnnnnnnnnnnnnnnnnnnnnnnnnnnnnnnnnnnnnnnnnnnnnnnnnnnnnnnnnnnnnnnnnnnnnnnnnnnnnnnnnnnnnnnnnnnnnnnnnnnnnnnnnnnnnnnnnnnnnnnnnnnnnnnnnnnnnnnnnnnnnnnnnnnnnnnnnnnnnnnnnnnnnnnnnnnnnnnnnnnnnnnnnnnnnnnnnnnnnnnnnnnnnnnnnnnnnnnnnnnnnnnnnnnnnnnnnnnnnnnnnnnnnnnnnnnnnnnnnnnnnnnnnnnnnnnnnnnnnnnnnnnnnnnnnnnnnnnnnnnnnnnnnnnnnnnnnnnnnnnnnnnnnnnnnnnnnnnnnnnnnnnnnnnnnnnnnnnnnnnnnnnnnnnnnnnnnnnnnnnnnnnnnnnnnnnnnnnnnnnnnnnnnnnnnnnnnnnnnnnnnnnnnnnnnnnnnnnnnnnnnnnnnnnnnnnnnnnnnnnnnnnnnnnnnnnnnnnnnnnnnnnnnnnnnnnnnnnnnnnnnnnnnnnnnnnnnnnnnnnnnnnnnnnnnnnnnnnnnnnnnnnnnnnnnnnnnnnnnnnnnnnnnnnnnnnnnnnnnnnnnnnnnnnnnnnnnnnnnnnnnnnnnnnnnnnnnnnnnnnnnnnnnnnnnnnnnnnnnnnnnnnnnnnnnnnnnnnnnnnnnnnnnnnnnnnnnnnnnnnnnnnnnnnnnnnnnnnnnnnnnnnnnnnnnnnnnnnnnnnnnnnnnnnnnnnnnnnnnnnnnnnnnnnnnnnnnnnnnnnnnnnnnnnnnnnnnnnnnnnnnnnnnnnnnnnnnnnnnnnnnnnnnnnnnnnnnnnnnnnnnnnnnnnnnnnnnnnnnnnnnnnnnnnnnnnnnnnnnnnnnnnnnttaagcagtgagcgggttttccatctctgtgtttgcagtccgttagataattatttgacgtctgttatatataataaagttgaacagattgctcctaatattcatctcgtttttaaatcatctttaaatcaaaacactgagcaccagcttcgttatcaggaaacggagttcgttctgggctacgaagagtttcgccgtccagagtttgcctgtgttccgttgtttaaagatgaaatggtgttagtcgccagcaaaaaacatccacgcatgaattcgccgctgcgtgaaagcgatgtttacagcgagcagcatgccgttgttgctctggacagatatgcttcgttcagtcagccgtggtatgacactgccgataaacaagccagcgtggcctatcaggggatggcgatggtcagcgttttaaatgtcgtttctcagacgcagctagtcgctattgcaccgcgctggcttgctgaagagttctccgattcgctgagcctgcaaattttacctctgccgctcaagctgaatagccgtacctgttatctttcctggcatgaagcggcggggcgggataaagggcatcagtggatggaagagttgctgatcaatatttgtcgtcgataagtcagggtgaataaaccgcatggtgccatgcggtttattctgtgattttttattcaggcaatattttgttctgtgcgcattttttcagacgctcagggcggcttaaaaatagatgatttcctgatccatccactttttaagagatgaattattagcgtctcccctcataccagacgaattcaccatattcgtgtctgacagctattttttctgcttttattgcccattcccgcattccgtttgctaattgcctgcctcataacgagcggttaaggtatccatcactctgcacattataagatgggttcaccctgtcagaagacggcgcggaaatgaattctgttgaccgtctataacaaaagcctggaggcaaagcatggagatgttgtctggcgcggaaatggtcgtccgatcgcttatcgatcagggcgtgaaacaagtgttcggctatcccggaggcgcggttctcgatatttatgacgcgctgcacacggtaggcggtattgatcatgttctggttcgtcatgaacaggctgctgtgcatatggctgacggcctggcccgcgccacgggcgaagtgggtgtagtgctggtcacttcggggccgggagcgaccaatgccatcaccggcattgcgactgcgtatatggactctattccactggtcattctctccggacaggtggcgacgtcactgattggctatgatgcgtttcaggaatgcgacatggtggggatctcacgccccgtggtgaagcacagctttctggttaagcaaacggaagatatcccgggcgtgctgaaaaaagccttctggctggccgccagcggtcgtcctgggccagtggttgtcgatctgccaaaagatattctcaatcccgcgaataaactgccttacctgtggcctgagtcggtgagcatgcgttcgtataatccgacgacgcaagggcacaaaggccagattaagcgtgcgctgcaaacgctgctggctgcgaaaaagcccgtagtctatgtggggggcggcgccgtcaatgcagcctgtgaaacgcaactacgcgaactgattgagaagctgaatcttcctgtcgcgtcatcgctgatggggctgggggcattcccggctacccaccgtcaggcgctgggcatgctgggtatgcatggcacctatgaagccaatatgacgatgcaccattctgatgtgatttttgccgtcggcgtacgttttgacgatcgcaccaccaataacctggcgaaatactgtccgaatgcgacggtgctacacattgatatcgatcctacttctatctctaaaacggtgccggcggatgtgcccatcgtgggggacgcacgacaggtgctggatcaaatgttggaactgctggcgcaggagaccgcctctcaaccgctggatgagatccgtgactggtggcagcaaatcgaacaatggcgcggccgtcagtgccttaaatacgacacgcagagtgaaaacatcaagccgcaggcggtgatcgagacgatctggcatctgaccaaaggcgaggcgtatgtcacttctgacgtaggccagcatcagatgttcgctgcgttgtattacccgtttgataaaccgcgtcgctggatcaactcaggcgggcttggcacgatgggctttggtctgcccgccgcgctgggggtgaagctggcgttgccgaacgaaacggttatctgcgtaacgggtgatggcagtatacagatgaatattcaggagctttctactgcgctgcaatatgagttgccagtgctggtgcttaacctgaataacggttacctcggtatggtgaagcagtggcaggatatgatttattccggccgtcactctcagtcttatatgaagtcacttccggactttgtccgtctggctgaagcctatggtcatattggcatgcgggtaaccgatccgtcagagctggaagcgaagctcggcgaagcgcttgagcacgttaaaaacaatcgcctcgtcttcatggacgtcatcgtagacggcacagagcacgtttatccgatgcatatccgtggcggtggtatggatgaaatgtggttaagcaaaacggagagaacctgatatgcgccggatattatctgtattactggaaaatgagtcgggcgcactgtcacgcgtcattgggctttttgcgcagcgcggatacaacattgaaagcctgaccgttgcgccgaccgatgatccaacgctctcccgcatgacgatccagactgtcggcgatgcgaaagtgcttgagcagatcgaaaagcaattgcacaagctggtggacgtgttgcgcgtcagcgagctggggcagggggcttacgtcgaacgtgaagtgatgctggtgaaaattcaggccagcggttatggccgtgaagaggtcaagcgtaacacggatattttccgtgggcagatcattgacgtcacgccttctatatatactgtgcagcttgccggaacgagcgataagctggatgcgttcctggcctccgtcagggatgtggcaaaaattgttgaagttgcgcgctctggcgttgttggcctctcgcgcggcgataaaatcatgcgttagttgcgcaaaaggttcgcctctttcagcccggtagccaaagccgggcttttttttgcgtaatccgccgacaacgcggacaaaagcggttgccgtgaaagctattctgcgtttagatgttaaaatatttaaccataaccttgacagggccatggacttttttctttttttgaggggcaattgtgaaactggatgaaatcgcccggctcgccggcgtgtcgagaaccacggccagctatgtgattaacggtaaagcaaagcagtatcgtgtcagcgataagaccgttgagaaagtgatggcagtcgttcgtgagcataattaccatccgaatgctgtcgccgcaggtttacgtgccggacgcacccgctcgattggcctggtgatcccggatctggaaaacaccagctatacccgcatcgccaactatcttgaacgtcaggctcgtcagcggggctatcagctgttgattgcctgctccgaggatcagcccgacaacgagatgcgctgcattgagcatctgctgcaacgtcaggttgacgccatcatcgtgtcgacctctttaccacccgagcatcctttctatcagcgctgggcgaacgatccattcccgattgtggcgctggatcgtgctttggatcgtgaacatttcaccagcgtcgtaggtgccgatcaggacgatgcagaaatgctggctgccgagctgcgtaccttcccggcggaaacggtgctctatcttggcgctttgcctgaactatccgtgagcttcctgcgtgaacaagggttccgtacggcgtggaaagacgatccgcgtgacgttcattatctgtatgccaacagctatgagcgcgaagcggctgctcagctgttcgagaaatggctggaaacgcacccgatgccgcaggcgttgtttaccacctcgtttgccctgttgcagggggtgatggacgtgacgttacgtcgcgatggcaagctgccatccgatctggcgattgcgaccttcggcgataacgaactgctcgacttcctgcaatgtccggtgctggccgtggctcagcgtcaccgcgacgtcgccgagcgcgtgcttgagattgttctggcaagcctggatgaacctcgcaaaccgaaacccgggcttacgcgtatcaaacgtaatctctatcggcgcgggattttgagccgccattaatatttccacaggggcggtaaaactgccccttttgcggcgcatttattgcgggaaataattcccggataaaaattaggatttatctctaagattcgtagccggctatttttctgaatccgttttggcgttaaaaagcgcaattataatttttaacgggcattcttttgtattgttttgttacaaacagccgccagccgatgaatattcagccattttttactctccccttcagccctcaatgtacacgaacgaatccatattgccttgcgcttaatctggtgctgttatcccccggcgatatgccttaaaatgctgcccgcgtcgcaaactgacactttatatttccctgcgatgatattgagtgagtcttaacgctcgtgtgcatattcggtttttttcttacaaatattcataacgttaattttgcctcgccagttgtgtagttattagccaggtcactcttgctctgtaaatacggtgctttcgcgccggtatagagagagtcctggcttgacaagcttttccctcgctccgtaaactccttcaggtgggaatttgtgggttaaagtggtgaggaggggtgaggctggcatgttccgtggagcaacgttagtcaatctcgacagcaaagggcgtttatcggtaccaacccgataccgcgaccagctgattgagaacgcttcgggtcaactggtttgcaccattgacatcaactccccctgcctgctgctttaccctttgcctgaatgggaaatcattgagcaaaagctgtcgcgactgtcgagcatgaacccgcaagaacgccgcgtgcagcggttgttattgggacatgccagtgaatgtcagatggatagcgccgggcgattattgattgcgcctgtgttgcggcaacatgccggtctgactaaagaagtgatgctggtcgggcagttcaacaagtttgaactgtgggacgaaacgacctggtatcaacaggtcaaggaagatatcgacgctgagcagtctgattccgcaacattatcggaacggctgcgggacttgtctctataaatatgatggaaaattataaacatacaacggtgctgctggatgaggccgttaacggcctgaatattcgtccagacggcatctatattgatggcacttttggtcgcggtggtcactcgcgtttgatcctctcccagcttggagcggaaggacgcctgctggcaattgaccgcgatccgcaggcgattgccgttgcgcaaaccatcgatgatcctcgcttttccatcgtgcatggacctttctctgcgcttgcggattatgtcgctgagcgcggcctgaccggcaagatcgacgggattctcctcgatcttggcgtctcttcaccacagcttgatgatgcagaacgcggcttctcctttatgcgtgatgggccgctagatatgcgtatggaccccactcgcggccagtctgccgctgaatggttacaaactgctgacgaagcggatattgcctgggtaatcaaaaccttcggtgaagaacgctttggcaaacgtattgcgcgcgccatcgtggagcgcaaccgcgttgagccaatgacccgtaccaaagagctggcagaagtcatcgcggcggcaacgccggtgaaggacaagcacaaacatcctgcgacccgtaccttccaggcggttcgtatctgggtaaacagtgaactggaggaaatagagctggcgctaaaaagctcgctcgacgtgctggccccgggtgggcggttatccatcatcagcttccattcgctggaagatcgcatcgtaaaacgctttatgcgtgaacagagccgcggtccgcaggttccagctgggttgccgatgacggaagaacaactcagaaagctgggaggccgtcagttgcgagcattaggcaagttgatgccgggcgaagaagaggtggcagagaatccacgtgcccgtagttcagtgctgcgtattgcagagaggacgaacgcatgatcagcagagtgacagagaccctaagcaaagttaagggatcgttaggaagcaacgagcgccatgccttgcctggcgtgatcggcgacgatcttttgcggtttgggaagctgccactctgcttgttcatttgcatcattgtgacggcagtcatggtggttaccaccgctcaccatacccgtttattaactgcgcagcgcgaacagatggtactggaacgcgatgcgctggatattgaatggcgaaatctgatccttgaagaaaacgcgctcggcgatcacagccgggttgaacggatcgcaacggaaaaactgcaattacagcatgttgatccttcgcaggaaaatatcgtagtacaaaaataagggaaaacgcgacgcatgaaagcagcggcaaaaacgctaaaaccaaaacgccaggaagaacaggccaactttgtcagttggcgttttgcgttgctttgcggctgcattttactggcgctgggtttcctgctgggacgcgtggcgtggctacaaatcatcgcgcctgacatgctggtacgtcagggtgatatgcgttctctgcgcgtgcaggaagtttctacctctcgtgggatgatcaccgatcgttccggccgtccgctggcggtgagcgtgccggtgaaggcgatctgggccgatccgaaagagttacacgatgcaggcgggatcacccttgataaccgctggaaggcgctgtcagacgcgttgaaaatgccgctggatcagctggcgtcgcgcgttaacgccaacccgaaagggcgctttatctatcttgcccgtcaggtgaaccctgacatggctgactacattaagaaactgaagctgcccggcattcatctgcgggaagaatcccgccgttactatccttcgggcgaagtcaccgcgcacctgattggctttaccaacgtggatagccaggggattgagggcgttgaaaaaagcttcgacaagtggcttaccggccagcctggcgagcgaatcgtgcgtaaagaccgctatggtcgcgtcattgaagacatttcctcgacagacagccaggccgcgcacaacctggccctgagtattgatgaacgcttgcaggcgctggtctatcgtgagctgaacaacgccgtcgcgtttaacaaggcggaatcgggcagcgccgtgctggtggatgtggcgacaggtgaagtgctggcgatggccagtagcccctcatacaacccgaataattttgccggtacagcaaaagatgcaatgcgtaaccgctccatcaccgatgtgtttgaacccggctcaaccgtaaaacctatggtggtgatgacggctctacagcgaggcatcgtcaacgaaaataccgttctgaatacgattccttatcgaattaacggtcacgaaatcaaagacgtggcacgttacagcgaactgaccctgaccggggtcttacagaagtcgagtaacgtcggtgtgtcaaaactggcgttagcgatgccgtcctcagcgttagtagatacttactcacgttttgggctgggaaaggcgaccaatttggggttggtcggagaacgcagtggcttatatcctcaaaaacaacggtggtctgacatagagagggccaccttctctttcggctacgggctaatggtaactcccttacagttagcgcgagtctacgcaacgattggcagctatggcatttatcgtccgctgtcgatcaccaaagttgatccaccggttccgggggaacgtgttttcccggaatctatcgttcgtaccgtcgtgcatatgatggaaagcgtcgcgttacctggcggtggcggcgtgaaggccgcaattaagggctatcgtatcgccattaaaaccggtacagcgaaaaaagtggggccggacggccgctatatcaacaaatacattgcctataccgcaggcgtagcgcctgcaagcaatccgcgttttgcgctggtggtcgtcatcaacgatccgcaggcgggtaaatactacggcggcgccgtctccgcgcctgtgttcggggctattatgggcggcgtgttgcgcaccatgaacattgaaccggatgcgctggcgacgggcgaaaaaagtgaatttgtaattaatcaaggcgagggaacaggtggcagatcgtaatttgcgcgaccttcttgctccgtgggtgcctatgctacctgcgcgagcactgcgagagatggtactggacagccgcgtagcggcttctggcgatctttttgtggcagtagtgggtcatcaggcggacgggcgtcgttatatcccgcaggcgattgcgcaaggtgttgctgccattattgctgaggccaaagatgaggcaacagacggtgagatccgtgaaatgcacggcgtgccggtcatctatctcagccagctgaatgagcgtctctccgcgctggcaggacgtttttacaacgaaccttccgaccagttaaagctggttggcgtgacaggaaccaacggaaaaaccaccaccactcagctgatggcgcagtgggcgcagctgctgggcgaaaccggtgccgtcatgggcacggtggggaacggtcttctgggcaaagtaagcccgacggaaaacactacaggctcggcggttgacgtgcagcgtgtgctggcgggcctcgctgagcagggggcgaccttcgctgcgatggaagtctcttcccatggtctggtacaacatcgcgtggcggccctgaaatttgctgcctctgtctttactaacctgagccgcgatcaccttgattatcatggtgatatggagcactacgaagcggcgaaatggctgctttattccactcaccaccacgggcaggcgatcattaacgccgacgacgaagtcggtcgccgctggctggaaaaactgccggatgcggtggcggtgtcgatggaagatcgcattaatccgaactgccgcggccgctggctgaaggcggtcgaggtgaactaccacgatagtggggcgacgatccgcttcgcttccacctggggcgaaggtgaaattgaaagccgcctgatgggggcctttaacgtcagtaacctgctgctggcgctggcgacgttgctggcgctgggctacccgatggcggatctgctgaaaacgtctgagcgtttgcaaccggtctgtggccgcatggaagtgttcagcgcgccgggcaagccgacggtggtcgtggattacgcacacacgccggatgcgctggaaaaagcgctggaagcggcgcgtctgcactgcgcaggcaagctctggtgcgtgtttggctgcggtggcgatcgcgacaagggcaaacgtccgctgatgggcgccatagctgagcagttcgcggatattcccgtggtaaccgatgacaacccgcgtaccgaagagccgcgggtcattatcaatgacattctggcgggcatgctggatgcgggtcgtgcgcgcgtggtggaaggccgtgcggaggccgtgaccaacgccattatgcaggcgcaggagaacgatgtggttctgctggccggtaaaggtcatgaagattatcagatcgtcggcaatcgtcgtctggattactccgaccgcgtgacggcagcgcgtctgctgggagtggtggcatgattagcattacgttaagccaggccgctgcggtattgcaggggatgctgcatggtcaggatctaaccattgaggctgtgaccaccgacacccgtaaggtgacggcgggctgcctgtttgtggcgctgaagggcgagcgttttgacgcccacgattttgcgcaacaggctaaagataacggcgcgggcgcgctgctggtcagccgtaagctcgatatcgatttgccgcagattgtggtgaaagatacgcgcctggcgtttggcgagctggcggcatgggttcgccagcaggtgcgaacacgcgtcgtggcgctgacgggctcgtcgggtaaaacctccgttaaagagatgacggcggcgatccttagccagtgcggtaacacgctttatacggcgggcaaccttaataatgacatcggtgtaccgatgacgctgctgcgcctgacccacgagcatgaatatgcggtgattgagttaggggctaaccatcagggcgaaatcgcctggaccgtgagcctgacgcgtccggaagcggcgctggtgaataacctggcggcggcacatcttgaaggttttggttcgctggccggtgtggcgaaagcgaaaggtgaaatttataccggcctgccggatgacggcatcgccattatgaacgccgataacaacgactggctgaactggcagagcatcattggttcacgcaaaacctggcgcttctcaccgaatgcggcaaacagtgatttttcggcgaccaacattcatgtgacgtcacacggcaccgagttcaccctcacgaccccaacgggcgacatcgaggtgctgctgcccctgcccggtcgtcataacatcgccaatgcgcttgctgcggcagcgctctcaatggcggtaggtgcctcacacgcggcgatcaaagcaggtctggcaaatttaaaagccgtgccggggcgtcttttcccgatccagctggctgaaaacaaacttctgctggatgactcctacaacgctaacgtcggctccatgacggcggccgtgcaggtcttgtctgagatgccgggctatcgcgtgatggttgtgggcgatatggccgagctgggtgatgaaagcgaagcctgccatgttcaggtgggtgaagcggcgaaagccgccgggcttgaccgcgtattgagcgcaggcacgctgagcaaggccatttccgatgccagtgaagttggcgaacattttgccgataaatctgcactgatcgaacgcctgaaggcattgattacagaaaaacagattgtgactgttttagttaaaggttcacgtagtgccgcaatggaagaggttgtgcacgcattacaggagaacgggacatgttagtttggctggccgaacatttggtcaaatattactcaggctttaacgtcttttcctatctgacgtttcgcgccatcgtcagcctgctgactgcgctgttcatctcgctgtggatgggcccgcgcatgattgcccgtctgcaaaaactctctttcggccaggttgtacgcaacgatggtccggaatcgcacttcagcaagcgcggtacgccgaccatgggcgggatcatgatcctgaccgcgattgtggtgtccgttctgctgtgggcctatccgtctaacccctacgtctggtgcgtgctgaccgtcctggttggctacgggatcatcggttttgttgacgactatcgtaaagtcgtgcgcaaagacaccaaaggtttgatcgcccgctggaagtatttctggatgtcggtgattgcgctgggcgtggccttcgcgctttatctggcaggaaaagacaccccggccaccgagctggtggtgccgttcttcaaagacgtgatgccgcagctggggctgttctacattctgctggcttactttgtgatcgtcggcaccggcaatgccgtcaacctgaccgatggtctggacggcctggccatcatgccaaccgtgtttgtcgcgggcggtttcgcgctggtggcgtgggcgaccggtaacatgaactttgcaaactacctgcacatcccgtacctgcgacatgcgggtgagctggtgatcgtctgtacggcgattgtcggggcggggctgggcttcctgtggtttaacacctatccggcgcaggtctttatgggcgacgtcggttcactggcgctgggcggtgcgctgggcattatcgccgtgctgctgcgtcaggagttcctgctggtgatcatgggcggtgtgtttgtggttgagacgctatcggtgattttgcaggtcggttccttcaagctgcgcggtcagcgcattttccgtatggcaccgattcaccaccactatgaactgaaaggctggccggagccgcgcgtcattgtgcgcttctggattatttcgctgatgctggtgctgattggcctggcaacgctgaaggtacgttaatcatggcagattaccagggcaaaaaagtcgtaatcatcgggttgggcctcaccggcctctcctgcgtggactttttccttgcgcgtggcgtgacgccgcgcgtgatggatacgcgcgtctctccatcgggtctggacaagctgccggagcaggttgaacgccacctgggtggtctgaatgatgagtggctgctggccgccgatctgattgttgccagccccggtatggcgctggcgcatccttccctgaacgccgccgcggatgcgggcgttgagattgtcggcgatatcgaactgttctgccgggaggcgcaggccccgatcgtcgccattaccggttcaaacggtaaaagcaccgtcaccacgctggtgggggaaatggcgaaggcggcgggcaaaaatgtcggcgtgggcggtaacattggtctgcccgctctgatgctgcttgataaagggtgtgagctgttcgtccttgagctttccagcttccagctggaaaccacttcaagcctgcatgcggcggcggcgacgatcctaaacgtcaccgaagatcatatggacagatacccgttcggcttgcagcagtaccgtgcggccaaactgcgcgtttatgaaaatgccaaagtttgcgtagtgaatgccgatgatgcactcaccatgccggtgcgcggcgcagacgaacgctgcattagcttcggtattaacatgggtgactatcaccttaatcgtcagcagggcgaaacctggctacgtgtgaaaggtgagaaagtgctgaacgtgaaagaaatgatgctctccggccagcataactacactaatgccctggcggcgctggcgctggcggatgctgttggcctgccgcgatcttcaagcctgaaggcgctcaccacctttaccggcctggcgcaccgcttccagctggcgctggagcacaacggcgtacgctggattaatgattccaaagcgaccaacgtgggtagcaccgaggcggcactgaacggtttgcacgttgatggcacgctatacctgctgctgggcggcgacggtaaatcggctgacttctcctcgctgaagcagtacctcaacggtgataacgtgcgcctgtattgctttggccgcgatggcagcgagctggcggcgttgcgtcctgaagtcgccgagcaaaccgagaccatggagcaggcgatgcgcctcatcgccccacgcgtgaagcccggcgatatggtactgctctcgccagcctgtgccagcctcgatcaattcaagagtttcgaacagcggggtgatgtctttacccgcctggcgaaggagttaggctgatgcgtttatctctccctcgcctgaaaatgccgcgcctgccaggatttggtatcctggtatggctgtttacggcgctgaaaggctgggtgatggcttcccgggataaagattccgatagcctgatcatgtacgaccgcacgctgttctggctcacgctggggctggcagcgatcggctttattatggtcacctcggcgtcaatgcctgtcggacagcgtctggcaaacgacccgttcctgtttgccaagcgtgacgggctgtacatcattctcgcgttctgcctggcaatgatcaccttacgcctgccgatgtcgttctggcagcggcacagtacagccatgctcatcgcctcaatcatcatgctgttgatcgttctggttgtcgggagctccgttaacggggcatcacgctggattgcctttgggccactgcgtatccagcccgcggagttcaccaaactgtcgttgttctgctacctggctaactacctggtgcgtaaagttgacgaagttcgtaacaaccttcgtggcttcttaaaaccgatgggcgtgattctggtcctcgcgatcctgctgctggcgcagcccgacctcggtacggtagtcgtactgtttgtcactacgctggcgatgctgttcctggcgggcgcaaaactgtggcagttcattgccatcatcgggatggggatttcggcggtggtgctgctgatcctcgccgagccctaccgtatccgccgtgtgacctcgttctggaacccatgggaagatccgttcggcagcggttaccagctgacgcagtcgctgatggcgtttggccgcggcgaagtctggggtcaaggcctgggcaactcggtacaaaaactggagtatttaccggaggcgcacaccgacttcatcttctccattattggggaagaactgggttatatcggtgtggtattggcgctattaatggtattcttcgtcgctttccgcgccatgtcgattggccggaaagcgctggagatcgatcaccgcttctccggtttcctggcctgctcaattggtatctggtttagcttccaggcgctggtaaacgttggggcggcagcgggtatgctgccgaccaaaggtctgacgttgccgttgatcagttatggtggttcgagtctgctgatcatgtcgacggccatcatgtttttgttacgcatagattatgaaacgcgtctggagaaagctcaggcgtttacacgaggttcacgatgaatcaaccgaagcggttaatggtgatggcaggcggtaccggtggacacgtgttcccgggactggcggttgcgcaccatttaatggaacagggctggcaggtacgctggctgggaaccgcagaccgcatggaagccgatctggtacctaaacacggtatcgagatcgactttattcgtatttctggccttcgtggcaaagggatcaaggcgcagctgctggcgccggtgcgcattttcaatgcctggcgtcaggcgcgcgccattatgaagcgttttaagcctgacgtcgttctgggcatgggcggttacgtttccggtccgggcggactggcggcgtggtcactgggcatccccgttgttctgcatgagcagaacggtattgccgggttgaccaacaaatggctggcaaaaatcgccaccaaagttatgcaggccttccccggggcattcccgaaagcggatgtcgtagggaatccggtacgtgtggacgtgctggcgctgccgctgccagatacgcgtctggcgggtcgcgaagggccggtgcgcgtgctggtcgtcggcggttcccagggcgcacgtattttaaaccagacgatgccgcaggttgcggcaaaactgggtgatgcggtgaccatctggcaccagagcgggaagggcgctcagcagaccgttgagcaggcctacgtgcaggaaggtcagtcgcagcataaagtgactgaatttattgatgatatggccgcagcctatgcctgggccgatgttgtggtctgtcgctcgggcgcgctgacggtgagcgaaatcgccgccgccggtttaccggcgctgtttgtgccgttccagcacaaagaccgacagcagtactggaatgcgctgccgcttgagaaagcgggcgcagcgaagatttttgagcagccacaatttaccgctgatgcggtcgccactaccctggcgggctggaaccgggatgtattactggagatggcgcaacgcgcacgcgcgaccgctatcccggatgcaacggaacgggtggcaaaagaagtgagcctggcagcccaggcataattctcgcagtgcgtgttgcgctgcacgatttttttgaagtagtcgatggcgtttagagaatgaatacacaacaactggcaaaactgcgttctatcgtgcccgagatgcgtcgcgtccggcacattcactttgtcggcatcggtggtgctggcatgggcggtattgccgaagtgttagctaacgaaggctatcagatcagcgggtctgacctggcgccaaaccctgttacgcagcagttggcgtcgctgggggcgactatctatttcaatcatcgcccggaaaacgtgagcgatgcgagcgtggttgtggtgtccagcgctatctccgcggataacccggaaatcgttgcggcgcatgaggcgcgcatcccggtgatccgtcgcgcggaaatgctggcggaactgatgcgtttccgtcacggcattgcggtggccggtacgcacggtaaaaccaccacaacagcgatggtctccagcatttatgcggaagcgggtctcgacccgacgttcgttaacggtggtctggtgaaagccgctggcgtgcatgcgcgtctgggccacagccgttatctgattgcggaagcggatgagagcgatgcgtcgttcctgcatctacagccgatggtggcgatcgtcaccaacatcgaagctgaccatatggacacttaccagggcgacttcgagaacttaaagcagacctttattaacttcctgcacaacctgccgttttatggccgtgcggtgatgtgcgtggacgatccggttattcgcgagctgctgccgcgcgtcgggcgtcaaattacgacctacggcttcagcgaagacgcggatgtacgtgtagaagattacaagcagatcggtgcgcaggggcatttcaccctcgcgcgtcaggataaagacctgctgcatgtcaccctgaacgctccgggacgtcacaacgccctgaatgcggcggcggccgtggctgttgcgacagaagaaggcattgacgatgaagcgatcctgcgcgcactggagagcttccaggggacgggccgtcgcttcgacttcctcggtgaattcccgctggagccggtaaacggtaagccaggttctgcgatgctggtagacgactacggtcaccatccgacggaagtggacgcaaccatcaaagcggcacgcgcgggttggccggaaaagaatctggtcatgatcttccagccgcaccgttacacgcgtactcgcgatctgtatgacgattttgccaacgtcctttcgcaggttgataccctgctgatgctggatgtttatgcagcgggtgaaactccgattccgggcgcggacagtcgttctttatgtcgtaccatccgtggacgcggtaaagtggatcctattctggttcccgacccggcgcaggtggctgaaatgcttgccccggtcctgacgggtaacgatctgatcctgattcagggcgcgggaaatatcggcaaaatcgcccgtaccttagctgaaatcaaactgaagccgcaaactcaggaggacgagcgtcatggctgataagattgctgtcctgtttggcggcacttccgccgaacgcgaggtttctctgaattcgggcgctgccgtgctggcgggcctgcgtgaaggtggcgtggacgcgcatccggttgatccgaaagaggtggacgttacgcagctgaaagcgatgggcttcgataaagccttcatcgcgttgcacggtcgcggcggtgaagacggcacgttgcaggggctgctggagctgatcggtatgccgtacaccggcagcggcgtgatggcatccgccatctccatggataaactgcgcagcaaactgctgtggcagggggcggacctgcccgttgcgccatgggttgcactgacgcgtcgtgaatatgaaatgggtctgtcggacagcgttaatacacgcattgcggcactgggcttaccggttattgtgaagccgagccgtgaagggtcgagcgtgggaatgtctaaagtcgataaagctgtagatttggctgacgctttagcactggcatttcaacatgatgaagaagttctgattgaaaaatggcttagcgggccggaatttaccgtcgcgatgcttggcgaagaaattttaccgtcaattcgcatccaacccgccggagtcttctatgattatgaggcgaagtatctctctgatgagacgcaatatttctgcccagcgggtcttgaagcagagcgtgaggccgaattacagtctctggtgcttaaagcctggaatgtgctgggatgtcgtggctggggacgcattgacgtgatgcttgacggtgacgggcaattttatctgctggaagcaaacacgtctccgggtatgaccagccatagccttgtgccgatggcggcgcgtcaggcgggaatgagcttctcgcagttagtcgtacgtattctggaccaggcgggctgatatgtctcaggctgcattgaacacgcgcaaccgcgatgacgaagaagaatactcctcttcgcgccggagtaatggaacgcgtcttgcagggatcatcttcctgctcggggtgctgtgcaccgtgtttatcagcggctggatggtgctgggctggatggaagacgcgcagcggttgccgctgtcgaagctggtggtgaccggggagcgacactacacgcgtaacgatgacattcgccagtcgattctggcgcttgggtcgcctggcacctttatgacgcaggacgtcaacattatccagagtcagattgaacgtctgccgtggataaaacaggcgagtgtcagaaaacaatggcctgatgaattgaagattcatctggttgaatatgtgccgattgcgcgttggaatgatcagcatatggttgacgtagacggaaattcgttcagcgtcccgagcgatcgtgtcaacaagcagaatttaccgatgttgtatggcccggaaggcagcgaaaacgaagtattgcagggttttcgtgagatggggcaggtgctggctaaggatcgctttacgttaaaagatgctgcgatgacggcgcgccgttcctggcagttgaccctaacgaatggcattaagctcaatcttggccgcggcgacacaatgaaacgtctggcgcgttttgtagaactttacccggttttacagcagcaggcgcagacggatggcaaacggataagctacgttgatttgcgctatgactcaggcgcagcagtcggttgggagccggctccggtcgaggaacctaatcagcaacaaaatcaggcacaggtacaggcagaacaacaatgatcaagtcgacggacagaaaattggtagtaggactggagattggcaccgcgaaggttgccgctttggtaggggaagttctgcccgacggtatggtcaatatcattggcgtgggcagctgcccctcccgtggtatggataaaggtggggtaaacgaccttgagtcggtggtgaaatgcgttcagcgcgccatcgaccaggctgaattgatggcagattgccagatttcctctgtctatctggccctgtctggtaagcacatcagctgccagaatgaaatcggtatggtgccgatttctgaagaagaggtgacgcaggaagacgttgagaacgttgtccacacggcgaaatccgtgcgtgttcgcgacgagcaccgtgtgctgcatgtgatcccgcaggaatacgcgatcgactaccaggaaggcatcaagaatccggtcggtctgtcgggcgtgcgtatgcaggcaaaagtgcacctgatcacatgtcacaatgatatggcgaagaacattgtaaaagccgttgaacgttgtggcctgaaagttgaccaactcattttcgccggtcttgccgcgagctattccgtgctgaccgaagacgaacgtgaactgggcgtctgtgtggtcgatattggtggtggtacaatggacatggccgtctataccggcggtgcgttacgccacaccaaagtgatcccgtacgccgggaatgtggtgaccagcgatatcgcttacgcctttggtacgccaccgagcgatgcagaggcgattaaagtgcgccatggttgcgcgctgggctctatcgtcggcaaagacgagagcgttgaagtgccgagcgtaggcgggcgaccgccgcgcagcctgcaacgccagacgctggcagaggtgattgagccgcgttataccgagctgctcaacctggtcaacgaagagattttgcagttacaggaacagcttcgccagcagggtgtgaaacatcatctcgcggcggggattgtattaaccggcggggcagcgcaaattgaaggtcttgcggcctgcgctcagcgcgtgttccatacgcaggtgcgtattggtgcgccgctgaatattaccggtttaacggattacgctcaggagccgtattactcaacggccgtgggcctgctgcactacgggaaagaatcccatttgagtggtgaagcagaagtggaaaaacgcgtctcggtggggtcttgggtcaaacgacttaacacctggttgcgaaaagagttttaatttttttaagagaccggagagaattagcggtctcgggcgacaggcacaacggagagagagattatgtttgaacctatggaattaaccaacgacgcggtgattaaagtcatcggcgtcggtggcggcggcggtaacgccgtagagcacatggtgcgcgagcgcatcgaaggtgttgaattcttcgcggtgaacaccgatgcgcaggcgctgcgtaaaacggctgttggccagacgattcagatcggtggtggcatcaccaaaggtctgggagcaggggctaacccggaagtgggccgcaacgcggctgaagaagatcgtgaagcgctgcgcgctgcactggacggtgcagacatggtcttcatcgcagcgggtatgggcggcggtacaggtaccggtgcagcacccgttgtggcggaagtcgctaaagatttaggtattctgaccgttgctgtcgtgaccaagcctttcaactttgaaggtaagaagcgtatggctttcgcggagcagggtatcaccgagctgtccaagcacgtggactctctgattaccatcccgaacgacaagctgctgaaagtgctgggtcgcggtatctctctgctggacgcctttggcgcggcaaacgacgtgctgaaaggcgcggttcagggtattgctgaactgattacccgtccaggtctgatgaacgttgactttgcagacgttcgcaccgtgatgtccgagatgggctacgcgatgatgggctctggcgtggcgagcggcgaagaccgtgcggaagaagccgctgaaatggcgatctcttctccactgctggaagatatcgatctgtctggtgcgcgcggcgtgctggtcaacattaccgctggctttgacctgcgtctggatgagttcgaaaccgtgggtaacaccatccgtgcgttcgcctctgacaacgcgaccgttgttatcggtacgtcccttgatccggaaatgaacgacgaactgcgtgtgaccgttgtggccaccggtatcggtatggacaagcgtcctgagatcaccctggtgaccaacaaacagactcagcagccggttatggatcgttaccagcagcacggtatggcgcctctgactcaggagcaaaaacccgctgcgaaagtggtgaacgacccaactccacaaacggcaaaagagccagattatctggatatcccggcgttcctgcgtaagcaagctgactaagaattggctggaatttggggatttgcgctctttgtgctaaactggcccaccgttagtgatatacactctcggttggatagttaatttggcgagattatacgatgatcaaacaaaggacacttaaacgtatcgttcaggcgacgggtgtcggtttacataccggcaagaaagtcacactgacgttacgccctgcgccggccaataccggggtcatctatcgtcgcaccgacttgaatccaccggtagattttccggccgatgccaaatctgtgcgtgatactatgctctgtacttgtctggtgaacgagcatgacgtgcggatttctaccgtagagcacctgaacgccgccctggcgggtctgggtatcgacaacattatggttgaagtcgatgcgccagaaatcccgatcatggacgggagtgctgctccgttcgtttatttgttgctggatgccggcatcgaagaactgaactgcgcgaagaaatttgttcgcattaaagagaccgttcgcgtcgaagatggcgacaaatgggctgaattcaaaccgtacaatggtttctcgttggacttcaccatcgattttaaccatccggcgattgactccagcacccagcgctatgcgatgaacttctctgcggatgcgttcatgcgtcagatcagccgagcacgtaccttcggctttatgcgtgatatcgaatatctgcaatcccgcggcctgtgcctgggcggcagcttcgattgtgccatcgttgttgacgattatcgcgtactgaacgaagacggcctgcgttttgaagatgaatttgttcgtcacaaaatgttggacgcgatcggcgacctcttcatgtgtggtcacaacatcattggtgcatttaccgcgtttaaatccggtcatgcactgaacaacaaactgttgcaggccgtcctggcaaaacaggaagcctgggaatatgtgaccttcgaagacgaagctgaactgccgctggcgttcaaagccccgactatggtcctggcgtaacggttaaagccgtttcgtaagaaaagcgactggttcacctggtactctctccgaccagggaagccagtcgtttttatttctgcccttctttaatttgtccccctcacccctggcctgtgtcgggtgccgaataacggtgtgttcgctgcattattgaccgtttttacctgctgcaaggtgtcattcctgctgccgtgtattggctttagtggtaatatctgggcgctaaaaaagaataactgaactcagcctgcactggcgggcgaacgtggtggagcaagtgagcggaatactgacgcgctggcgacaatttggcagacgttacttctggccgcatctcttattggggatggtcgcggcgagtttcggcttgcctgtgctcagcaacagcgcagacgcggccacgccagcacgttccacgacgaccaaacacgatctcaccacacgggttaacttcactaatctcgcatggcttgaagccagccgccgtcccaatttctccgttgattactggcagcagcacgcgattcgcacggttatccgccatctgtcattcgcgatggcgccgcagacgatgcctgttgcggaagaaacgctgccggttcaggctcagcatcttgccctgctcgatacgcttaatgcgcttctgacgcaggacaaccagccgccagtgaccgtaaatcagacggcgcaaacggattttgtttcccctgcatccttctctgtttcgacatggattagccaggttcacggcatccgtgccgggcctcaacgcctcagctaaattaacctttttcaataccttaatttatctgcccgactggggcgtttgagaatttattatgctaatcaaattgttaaccaaagtttttggtagtcgtaacgatcgtaccctgcgccgcatgcgcaaagctgtgaacgtcatcaacggtatggaaccggcgatggagaagctcactgatgatgagctgaaagcgaaaactgcggagttccgtgcgcgtctggagaaaggtgaaaccttagaaagcctgatcccggaagccttcgccgttgtacgtgaggccagtaaacgcgtgttcggcatgcgtcacttcgacgtgcagctgctgggcgggatggtgctcaacgagcgctgcatcgcggaaatgcgtaccggtgaaggtaaaaccctgacggcaacgctgccggcttacctgaatgcgctgacgggtaagggcgttcacgttgttaccgtcaacgactatctggcgcagcgcgacgccgaaaacaaccgtccactgttcgaattcctcggcatgaccgtgggcattaacatgtccggcctgccggcacctgccaagcgtgaagcgtataacgcggatatcacctacggcaccaacaacgaatacggcttcgactacctgcgtgacaacatggcgttcagcccggaagagcgcgtccagcgtaaactgcactatgcgctggtggatgaggttgactccattctgatcgatgaagcgcgtaccccgctgatcatctccggcccggccgaagacagctccgagatgtaccgtaaagtcgacaaaatcattcctcacctgctgcgtcaggagaaagaagactccgataccttccagggtgaaggtcacttctccgtggatgaaaaagcgcgtcaggtcaacctgaccgaacgcggcctggtgaaaatcgaagagctgctggtggctgaaggcattatggaagagggcgagtctctgtactccccgagcaacatcatgctgatgcaccacgtaacggctgcactgcgcgcgcacgccctgttcacccgcgacgttgactacatcgttaaagacggcgaagtcatcatcgtcgatgaacacaccggccgtaccatgcagggacgtcgctggtccgatggcctgcaccaggccgtggaagcgaaagaaggcgtggatattcaaaacgaaaaccagacgctggcatccatcaccttccagaactacttccgtctgtacgagaagctggcggggatgaccggtaccgcagataccgaagcgtttgagttcagctccatctataagctggataccgtggtagtacctaccaaccgtccgatgatccgtaaggatatgccggacctggtatacatgactgaagcggaaaaaattcaggcgatcattgaagatattcgcgaacgtaccgcgaagggccagccggtactggtggggaccatctccatcgagaaatccgaagtggtatccaacgagctgaccaaagcaggcatcaaacacaacgttctgaacgccaagttccacgctaaagaagcagatatcgttgcgcaggccggttacccggctgccgtaaccatcgccaccaacatggcgggtcgtggtaccgatattatgctcggcggtagctggcaggccgaagtggcggagctggaaaacccaaccccagagcaaatcgcgcagatcaaagccgactggcaggtgcgtcacgacgcggtgctggcatccggtggtctgcacatcattggtaccgagcgtcatgaatctcgtcgtatcgataaccagctgcgcggtcgtgcaggtcgtcagggtgatgccggttcttcccgcttctatctgtctatggaagatgcgctgatgcgtattttcgcctctgaccgtgtgtccggcatgatgcgtaaactgggcatgaaacctggcgaagcgatcgagcacccgtgggttaccaaagcgattgccaacgcccagcgtaaagtagaaagccgcaacttcgatattcgtaagcagctgctggaatatgatgacgttgccaacgaccagcgtcgtgcgatctacacccagcgtaacgaactgctggacgtgtccgacgtgagcgaaaccatcaacagcattcgcgaagatgtgttcaaagccactatcgacgcgcacattccgccgcagtctctggaagagatgtgggatatcgaaggtttgcaggaacgtctgaaaaacgacttcgatctcgaactgccaatcaaagagtggctggacaaagagcctgagctgcacgaagagaccctgcgcgagcgtatctacgaaaccgcgctggacgtctacaagcgtaaggaagaagtggttggcgcagagatgatgcgtcacttcgagaaaggcgtaatgttgcagaccctggactccctgtggaaagagcacctggcggcaatggactacctgcgtcagggtatccacctgcgtggttatgcgcagaaagatccgaagcaggagtacaagcgtgaatccttctccatgtttgctgccatgctggagtcgctgaagtatgaagtcatcagcaccctgagcaaagttcaggtgcgtatgccggaagaagtggaagcgatggagcagcagcgtcgtgaagaagctgagcgtctggcacagatgcagcagttgagccatcagaccgatgagagcgaagccgcagcggcaatcgcagcgcagacgggcgatcgtaaagtcggtcgtaacgatccgtgcccatgcggttccggcaaaaaatacaaggcgtgccacggccgtctgagttaagaacataacaaactgaaaaggcgcagatatctgcgccttttttatggaagtgacatgatgaaaacactgcaaattgctgtcgggatcattcgcaacccgcaaaatcagatcttcattacccaacgtgccgccgatgcgcacatggccaacaaatgggaattccccggcggaaaaatcgaatcaggtgaaacgccggagcaggcgctggtgcgtgagcttcaggaagaggtggggatcaccccgcttggcgcaacgctgttcgataagctggagtaccagtttccggatcgtcacatcacgctgtggttctggctggttgaaaactgggaaggtgagccgtggggaaaagaggggcagccgggtaactggattgagcttcaggccagcgatgcggaaaaattcccgcctgccaatgagcctgtgatcctccggctggccgcacaaccgtaggcctgctaagcgaagcgccagcaggctttgaacgttactgctggttttcgctccagtcatcgctatccgagagatcgccttcgctcggaatgcgtttctcttccgccgcccattcgcccaggtctataagctgacagcgcttacagcagaatgggcgaaatggacttacgtctccccagacgacagttttcccacaggttgggcagtttacggtggttacgtcagacattggcactccttaacaacaggccagttcaaaatcgaggcgttccggcacggtgccatgttcactgtccagcggcataaagcggatcgcgaaacggcttttatgcccggaaatttgcgggtaaagctgctcgccaagagacaggttcaggcgcagaagatcggcgtcgtcgccgttatcctgatagaaaccgttgagactggtttgtttgcggaacggggcagagttacgcacaagatcgaggatcagggataacgtctgattcatcggctccaggctgcccagccagctgttcacctggcgatcgcgctgttcctgcggcatgtgcagccacatatgcagcgttggcaggtcaaagctacagcatccgcccggtatgctcaggcgctggcgcaccagcgcaatcagacgatcctctcgtaaaaactggccaacgcgcggcgcggccatcagggtcgtgctgctgtttttcagctgctggcgtaaagcgtcaattcgactttgatccacgcccggtacttcggcccaggcctgtaatttacgctgctggcgctccagctctttcaacagctcagtgcggacgtcgccgcgttcaatcacatccagcagatcgcccacgttgcggaaaaaatgcagcgccgtggcgtgatcgttgacaggcagatgttgtgaaagctgttgaataagaaattctatgcgtagccaggtacgcattttttcgttaagcgggtgctcaaaaaggatatgagtcgacattatggtttttcctgtgcaacggcctgcgcggcgaaggtcagatactgcgcgtgcagacgagcaacatccgatgcaatggcatctggtgcgccgttattatcaataacatcatccgcaatggcgaggcgcgcttcgcgcgtggcctgtgcggcaagaatttgttcagcatgctcgcgagaaacattgtcacgcgccatggttctctggatttgcgtttcgcgggaaacgtcaatcaccagtgttctgtctgctttattttgaagctgattttccaccagtaacgggaccacccacaacacatagggcgaactagctgcggcaatctgacgctgagtttcctggtggataatggggtggagcagggcattaagccaggctttttccgctggatcggaaaatatgcactcacgcagctgccgacgattcagggtgccgtcagcctgtatcacggggcgaccaaaatgcgcttcgatggcgtttaaggcgggtgtattgggttctaccacctgacgggcaatgatatcggcgtcgataatcgtgatgccgagacgagcaaacgcgtgcgcaacggtgcttttaccactaccgatgccgccggttaatgcgacgatataccccattaaatcagatcctgggaattattcagttttaaaatcagttgcttaaaattcaaacttacaacagccaatgtttagctctctttacccgctttttaccaggtaaatttataggattgtagcgtaaaaaaagagaatttcgcagtcttgcggagcaggtattagtgcgtatgatagcgtcactggagttgtgcttttaatatatttgcctctaaccccaggaatccgcacatgcgtatcgaagaagatctgaagttaggtttcaaagacgttcttatccgccctaaacgctctacactgaaaagtcgctcagacgttgaactcgaacgtcaattcacctttaagcattccggtcagacgtggtctggcgtgccgattatcgcggccaacatggacaccgtcggaaccttcgagatggctaccgcactggcgcaattcgacatccttactgcggtacacaaacactacagcgctgaagagtgggatgcgtttgtcgcctccgcctcggctgacgtggtgaagcatgtgatggtctcgaccggtacctctgatgcagatttcgagaaaaccaaacagatcctgaacgccaatccagcgctgaattttgtctgcattgacgtggcaaatggttattccgagcatttcgttcagttcgtcagcaaggcacgtgaggcctggccaaccaaaaccatcatcgcgggcaacgtggtgannnnnnnnnnnnnnnnnnnnnnnnnnnnnnnnnnnnnnnnnnnnnnnnnnnnnnnnnnnnnnnnnnnnnnnnnnnnnnnnnnnnnnnnnnnnnnnnnnnnnnnnnnnnnnnnnnnnnnnnnnnnnnnnnnnnnnnnnnnnnnnnnnnnnnnnnnnnnnnnnnnnnnnnnnnnnnnnnnnnnnnnnnnnnnnnnnnnnnnnnnnnnnnnnnnnnnnnnnnnnnnnnnnnnnnnnnnnnnnnnnnnnnnnnnnnnnnnnnnnnnnnnnnnnnnnnnnnnnnngttggcattggcccgggtccgtttgcaccacgcgcgtgaaaaccggtgtgggttatccgcagctgtctgcggtaattgaatgcgctgacgctgcgcacggtctgggcggccagatcatcagcgacggtggctgcaccatgccaggcgatgtcgcgaaagccttcggcggcggcgcggatttcgtgatgctcggcggcatgctggcaggccacgaagagagcggcggtaccgtggtggaagagaacggcgagaaattcatgctgttctacggaatgagctctgaatccgcgatgacccgtcacgtgggcggtgtcgcgaaataccgtgcggcggaaggcaaaaccgttaagctgccactgcgtggtccggtcgaaaacacggcgcgcgatatcctcggcggtctgcgttctgcctgcacctacgttggtgcttcccgcctgaaagagctgacgaaacgcacgacgtttatccgcgttcaggagcaggaaaaccgcgtatttaatagcctctgacggctacggctggcgcgcgtccgtgcgccagcattaccccgcgctcattgcatcccccagatggaaaatcggcaaatacattgccaccaccagcgtgccaataatcagacccgtcacgaccagtagcaaaggctcaagaagcgctgccagattgtctgcctgctgaaatgtctgttccgtatggtggcgggccagattcatcagcatcacatccagtgaacccgacacttctccggtgcgaatgagctgaatacacagtggcgtaaaaacagaggccttctggaaggaggaccacacgggcatcccctgttcgatatcgctgcgtatctcacggagtttctcctgccagtagcccctctcaacggtctcctccacactctccagtccttgtaaaaaggcaattccggcctgctgggttaatgacagcacggtaaaaatctgccccagtttttgcccgcgcgtcagcgtgcccatcaccggtacgtgtaacaagacatactgccagcgtggatgccgccgcagcttacaggcgatgacaaccattgccacgagcagggtcaaaagggtgaggatatgcgcctgaaccaaggccgccagccccatgactgcctgcgtgagcaaagggagcggggtgttgaacgttttgtagattgcagcaaactcaggcaaaaccagcgtgaccatcgccagcaccacgaaaacggccagcgtcaggatgatcagcggatagcgcagcgctttcttcaccttcgcactgagctgctgctgggatttttgttgctgcgcaagctgacggcagcaggcttcgagcttacccgtcagctcacccgtcttcaccattgagacataaagagggctaaacacctctggccatttcttcatggcctctgacagggcgcaaccttcgctcaggtcatcagcaagactgtgcagcagcgcctgccagtgctgcaaaggatgctgttccgccagcatgtgcaggctttgggatagcgtgagtccagcctgtagcagcgtggcgagctggcgaaaaatatcgtagcagtgctgcacctgccatcgctggcgctgctgacagcgttttagcgccagcgggtgcagttgtttaagcaccagagccgtgtaagctgcgtcacggtcgatggcccagagggtgccggtttgcacctccccctcggtgttcagggcacgccagcgccagagcgaattagcagccatcgggcattcccaggacgcgcaacagctcttcgagcgtggtcagcccttgctctacggccatgcagccatgctcaaacaaagaggtcattcccgcctgacgagcgctggacccaatcacctccgtgcttgctccgctggcgatggcctgccgcagcgtgtcgtcgatgacgagcacttcaaaaatggctacgcgaccataaaaaccgtggtagcagcgatcgcagccggtgggttgccagcgaggaagcggccggggccacagcgtgcggggtaattcggtgtggcggctggcttcctgtcggcagtacggacataaacggcgcaccagtcgctgggcaatcaccatcgagagcgccgaagagatcatccagcgcgcgacgcccatctgttgcagccgtaccagcgtttcagtcgtcgaattagtatggagggtggacagcaccagatgcccggtttgcgccgccttaatggcaatttctgccgtttcgccgtcacgaatttcacccaccataatgatgtcaggatcctgcctgagcagggcacgcagcacgctctggaaggtcagccccgcgcgcggattaatctgcgtctggtttaagcctgcaagcgggatttcaacgggatcttccacgctgcaaatattgacgtcaggggtatttcgcgcctgtaacgcgctgtacagcgtcaccgttttcccgctaccggtcgggccggtgaccagaatcaacccctgagggctgttaagcgccccggcaaaacgggcctgctggtctgcgctcatccccagctgttcaagctccagtgcctgctgtacctggtgaagcagacgaagcacgattttttctccaccactacagggaagggttgcgatacgaaaagagacggggacgcttgccagctccaccgtaaactggccgtcctgcggcaggcggcgctccgcaatatccagttgacccagcaccttcaggcgtgcggcaagcgtcgtcccgagggcggcagagatcggcagttgcgggtagagaacaccgtcgattcgcaaacggatctggtagccgtgctccgtcggttcaatatggatgtcagaagcccgctggtttactgcctgctgcaaggttgtactgagcacgtcagcggctgagtttggcgctatgcccggcaggtgtgatgatgagacggactgaagccgtttttccatccgttctgccgtccagcactcaatatcaatgcgcttctgcgtggcgaagcgtaacgcttccatcagctcagaggcaggattacccaccaccgcaatgctgatcatatcggtgtcgcttgcgagtagcagtgcgtgatggcgctgacagagcgtcattagctgttcggtattcattgtccactcctgtcagttgttgtcgaagcggaaaacatcttcacaggcttgtctgagcgccgtgtcggacgcaattttgcagtcacgcgtccagcccgtcataccgttaccgtcgctccagatcggtgtcatgagcacttcaagtccgttaaggctttcctgccctgttaacgatacggccccctttgccacgctcatcgctgaaacgtaacgtgtggttgtcggggaggggatgccattggtgcctgcgtcgcagctatccacaccaccacgatccagggcgcaaagctcaatggcggtgcggtaggggatgaacgtttgcagcatatcggtgagcgcggcttttcgcaggtagttctgataagccggaacgccaatcgcgctcaggatggcaataatgccaatgaccaccattagctcaatcagggtaaatccttgttgtctgttcatgtctgctccttacgttaagtggcgctactgtggcagtgccagcatgcagaaacgagggacaaaagcgtgaacgtgaaggggctttcagggaaatgattcagtgttgcagagaaggacagcgtaattgcgagcggtttcgtatttcccctctccgggcggagaggggaggataagttatttgaagcgcatcgagaggtcgagggcacggacgtgcttggtcagggcgccaacggagatgtaatcgacgccggtttcagcaaattcgcggatggtgtcgaacgtcacgttgccggacacctcaagctgcgcctggccgtttgtgcgtttgaccgcttcacgcatctgctccgtgtcgaagttatcgagcatgatgatgtcagcccccgctttaatggcctcgtccagctcctccagcgtttccacttccacttcgaccggcacatccggatgcagccagaaggctttttccacggcctgacgcaccgagccagaggcaataatgtggttctctttgatcaggaaggcatcggatagccccagacgatggttggcgccgccaccgcagagtaccgcgtatttcagcgcggtgcgcaggcccggcagggttttacgggtatccagcagctgcgtgcgggtgcctgccagcaggtcaacgtagcggcgtacttcactggcaacgccagagagcgtttgcacaaaattgagcgcggtgcgttcaccggtcagcaagacgcgggacgggccgtccagctcgaacagtggctgattcgccgtgaccgcatcaccgtcttcaacgtgccatgttacctgcacctcgtcgcctgccagctgggtaaagacctcctcaacccagcgtttgccgcagaaaacccccgcttcgcgggtgatgatcaccgcatgcgagcgtgtctcttttggcaacaattgggcggtaatatcgttatcggcgctgacgtcgccgccgagatcttctttcagggcatgggcaacgcttgccgggatatcactattaatacgttccagaagcgcgtcacgtcggtggtcggggttatagcggcgaggcggcatgataaaactccaaattggtaacgaatcataatattgaaacatgctactctgaaccgagtaacagcaccatagataaggagttccagcatgttgttagaaaacggatggctggtggacgcgcggcatgtaccgtcgccgcaccacgactgccgcccggaggatgaaaagcccacactgctggtggttcacaatattagtctcccgccgggtgagtttggcggtccgtggatcgatgcgttattcactggaacgatagatcccgatgcccaccccttctttgctgagattgcgcatctgcgcgtatcggcgcactgtctgatccgtcgtgatggcgaagtggttcagtatgttccttttgataagcgagcctggcatgctggcgtgtcgatgtatcaggggcgcgagcggtgcaatgatttctccattggaattgaactggaaggaacggacaccacgtcttacaccgatgcgcaatatgagaaactggttgctgtaacgcaaacgttaatcgggcgctatcccgccattgcagacaatattacagggcacagcgacatcgccccggaaagaaaaaccgaccccggcccggcgtttgactggtcccggtttcacgccatgcttaccacgtcgtcagataaggagataacatgacgttgtttaccatgctgctggttatgatcgctgaacgcctgtttaagctcggcgagcactggcatctggatcatcggctggaggtgttattccgccgcatcaggcatttttccatgctgcgcacgttgctgatggcggcaggcgtgatggcgattacgttcctgttgctgcgctcgctttacggcctctttttcaacgtgccgctgctggtggtgtggatcctgctcggcgtgctgtgtattggcgcgggcaaggtgcgtttgcactatcacgcgtatctgaaagccgcttcccgggatgatgcccacgcgcgcggcgcgatggcgagcgagctgacgatgatccacggcgtaccgccggactgcgatgaacgcgagtttctgcgggagctgcaaaacgcgctgctgtggatcaacttccgttactacctggcgccgctgttctggttcgtggtgggtggaccctgggggccggtactgctgatgggttatgcgttcctgcgcgcctggcagacctggcttgcccgctatcttacgccgcatgaacgtctacagtccggcattgatgccatcctgcacgtgctcgactggcttccggtgcgtctggtaggcgtggtctatgccctcatcggtcacggtgaaaaggcgctgcccgcgtggtttgtctcccttgcagaccgccatacctcgcagtatcaggttttaacccgactggcacagttctcgctggcgcgtgagccgcacacggacaaagtcgcaacgccaaaagctgccgtctcgatggcgaagaaaacatcctttgtggtggtggtgattgtggcgctgctgacgatttacggcacgctggtctaagccagcgcgccgaagctgttacggcgtatccgcaggcgggatgccgaagtcaggcatcccgttttcgttccagcggacgagtttcaggcgagtatggcgattgggatcgtaaagcggatcgccttcaatttcagtgtagtttcgcgcgtggtagaccagcatatcttcgccttccggcgtctgcgtaaagctgttatggcctggcccatactgacggttttcgtagctggtgacgaacaccgggcgcggggatttatgccagttagccgggttttgcggatcggcattcaggtctgcccacagtaatcccatgcagtagttctcgtcggtggcgctggcggaatagctgataaacagcttatcgccatggaacagcaccgccgggccttcgttgacccagaacccacggcactcccagtcatattccggtttactgagcatcaccggctcgcctttcagcgtccacggattttccatttcacacaggtaaagattggagttaccggaaatgtccggggctttttgcgcccacagataccagcgtttaccctgatgaataaaggtggtggcatccagcgcgaaggtgtcaaacggggttttgatttgccctttttccacccacgtaccggtgagcggatcgccgtctgcgcattcaatggcaaacatgcgatgctggaacatcccgagctgatcaagcgcctgggtatgcgtggcggcaaaatagatgtaccacctgccgtcgatatgatgcagttccggtgcccagatcagctggctcatcgggccggtgtcgggcttgcgccagacaatcacctcttcggcatcgcgtaaaccttccagcgagtccgcgcggcggatcgccagccgatcgtactccggcacggaggcgataaagtagtattgcccatcgtgacgcaggatatacgggtcggcgcgttgttcaataaacgggtttggccaggtttgcattcggctttccttatttagtctcagcggctttgagttcctgataatcgttcagctcgcgatagttggtgcgacgcttttccagatcggactggatctgcttcatggtctcacggtccactttcagcagacgtactacgcccgcggtaattaagtatccaatgccgggaatgatggtaaacagcagcacgatcccgttgatggcatccgcgctctgcgcttttgcgcccgcgtcgtagccgtaccaggagagcaggaagccgaccattgccccggcaatcgccagacccagcttcaggaagaagatgttgccggagaagctgatcccggtgatgcgtttcccggttttccactcgccgtagtcatccacgtcggccatcagcgaccagtgcagcggtgacgggatctggtgcaggatgttcagcaggacgtagagcacgacaatggttgtcgtcgctttcgggtcgaagaagtaaaaggcggttgagaaaatcgccagcacgatgttggtccagaagaagaccttcagcttacaccagcggtcggtcagcactttcgccagcatactgccgaacatcatgccgaccacgcccaggctgataaacagggtagcgaagtgggtgctctggcccatcacccacgttacgtaatacatggtggccgccatgcggataaagccagggcagacgttgcacagcgttaacagcagtatccgcacccactggtcattcttccacacgtctttcaggtcgtttttcagttcgtcatgagtttgcaccgccggacgcacgcgctcccgcaccgtggcgaagcagaacaggaacatgcaggtaccaatcagcgccagcacggtcattgccatctggtagcctttggctttgttatccccaccgaaccagtcggccatcggcaggagcgtcagcgacagcagcagcgtggcgataccaaccataacaaaacggtaggactggcaggcaacgcgctccttcgggtcgttggtgatcacgccgccgagcgagcagtagggaatgttgatagccgtgtaggtcagcgacagcaggaaataggtgacaaacgcatagataactttgctgttatagctccagtcaggcgtggtaaacatcaggatgctgaacagcgcgtaggggaaggcaatccacagcagccatggacgaaaccggccatatttgctgcgggtacggtcggcaatcgcgcccataattgggtccgtgacggcatcaatgacgcgtacggacaggagtaaaacgccaaccagtgcaggagccagaccaaaaatatccgtataaaagtagttaacaaataacatgatggcgccaaagataatgttgcatccggcgtcacccatgccatagccgatcttttcttttactgacagtttgttgttattcatcgacagctctccgggtttcggtatggagagaattattcgctggcaaacgaatatatgcgttgcaatataaaggcggtgatatggaggattttgctgtgggcgcgaatttgtgaggaaggtaacaagacgctgtacccgcaaccgcgagtacagcgagaaaacacttagtgcgctttcaccgttttggcatttttctgtttcaccatatagcccacgccgaggatcgcaatccagaccgggatcaggtagacggaaatcgccatgcctggggtgatgagcatgatgaccagcacagctgccatgaacagcaggcaaacccagttccccagcggatagagcagggcagggaagcgcgtggttacgccctgctggtgcttggcgcggcggaacttgatgtgcgcgaggctaatcatcgcccagttaatcaccagcgcggaaaccaccagcgccatcagcagaccgaaggcagattccggtgccaggtagttaatcagaacgcacagcgccgtcacgaccgccgacacgatgatggtattaaccggtacgccacgcttatcaacggtaagcagcgctttcggtgcgttgccctgttgcgccaggccgaacagcatacggctgttgcagtaaacgcagctgttataaacggagagcgcggcggtcagcaccacgacgttgagcgcgttcgccacgaaggtgtcgcccagctcgtggaagatgagcacaaacgggctggtatccgccgtcacgcgcgtccatggcagcagggagagcaggaccgccagggagcccacatagaagatcagaatacggtagataacctggtttgtggctttcgggatgctctgctccgggttgtcggcttccgcggcggtgatgcccactagctccagaccgccgaaggagaacatgataattgccatcatcatcaccagaccggtcatgccgtgcggcaggaacccgccttgctcccaaaggttgcgcacggtggcctgtggaccgccgttgccgctgaacagcagccagccgccgaagatgatcatcgctacaacggcaatcactttgatgatggcaaaccagaactccatctcaccaaacactttaacgttggtcaggttaatggcattgataatgacgaagaaggccgccgcagacgcccaggtggggatctccgggtaccagaactgaatgtatttcccaacggcggtcagctcggccatggcaaccagaacgtacagaacccagtagttccaccccgaggcgaaacctgcgaagctgccccagtatttataggcgaagtggctgaatgagcctgcgaccggctcctcaacaaccatttcacctaactggcgcataatcagaaatgcaataaaacccgcaatcgcgtaccccagaataatgcccggaccggccgactggataaccgatgcactgcccagaaacaggccagtaccaatagcaccgcccagggcgatgagctgaatatggcggtttttaaggccgcgctttagctgatcgccatgctgttgagcttccatttgaaacctcgtgtgtggttgttatgttcacgctgtgcgtgtgtaattatgaaagtccatattctgtatttatttctttacggttaacgataccgaaaaaagcggagatggcttccgttagcgcaagaatagtggtaagcgccagcgaatgcacctgctttatgaagggatgaagacgacttgaataaaaagaaaccaattgtaaatcggtacgttaacccctcataccccaacctatagaatagaaatgcgtcagaagagggcgaattttcattttttgccttgttgaatcgcttcagattgcaaaaaccctcgtttcattatggttaaaactgcctctttggtagtaaccatttcatttgtgcaaagttacattcctgaaacgttagttctgtaaggttgttaaaatgtgccgggtttactgatttcaatcaaaaccaatatggacagaaggtgaatactttgttactttagcgatacgaacatgaaattggtaagaccaattgactccgggcaaaaaggcgtaagacagggaatatggcctacagcaaaattcgccaaccaaaactttccgatgtgattgagcagcagctggagtttttgattctcgaagggacactgcgcccgggcgagaaactcccgccagaacgcgagctggcaaaacagttcgacgtttcacgcccctctctgcgtgaggcgattcaacgtctcgaagcaaagggcctgttgctccgtcgccagggtggcggaacctttgtgcaaaacagcctgtggcagagcttcagcgacccgctggtagaacttctctctgaccacccagaatcccagtttgatctgcttgagacccgtcacgcgctggaaggtatcgcggcttattacgccgcccttcgcagcactgatgaagaccgcgtacgtattcgcgagctgcatcaggccattgaacgggcacagcagtccggcgatttagacgccgagtccaatgccgtcgtccagtatcaaattgccgtcaccgaagcggcgcacaacgtggtgctcctccatctgctacgctgcatggagccgatgctggcccagaacgttcgtcagaattttgaattgttgtatgcccgtcgggagatgctcccgctggtaagcaaccatcgcacccgagtattcgaggcgataatggccggggaaccggagcaggcgcgcgaagcgtcgcaccgccatctggctttcattgaggaaatcttgctggaccgcagccgtgaacaatcgcgtcgcgaacgttcattacgccgcatacagcaacgaaaggattaagcgccaggtacttttagagcgcggcaactaaacgcagaacctgtcttattgtgttttctgacgaaaatacaatgggacaggttccagacaaatcaacgtattagatagataaggaatacccccatgtcagaacgtctccaaaatgacgtggatccgatcgaaactcgcgactggctacaggcgatcgaatcggtcatccgtgaagaaggtgttgagcgcgctcagtatctgattgatcagctgctttcagaagcacgcaaaggcggcgtgaaagtggcttcaggtgcaggggctagcaactacgtaaacacgattgccgtcgaagacgaaccggaatacccgggcaatctggatctggaacgccgtatccgttctgctatccgctggaacgccatcatgaccgttctgcgcgcatccaagaaagacctggaactgggtggccacatggcgtccttccagtcttctgcgaccatttacgaagtgtgcttcaaccacttcttccgtgcagctaacgagaaagatggcggcgatctggtgtacttccagggccacatctctccgggcatctatgcacgtgccttcctggaaggtcgtctgactgaagagcagatgaacaacttccgtcaggaagttcacggtaaaggtctgtcttcttacccgcaccctaaactgatgcctgagttctggcagttcccgaccgtatctatgggtctgggtccaatcggtgcgatctatcaggctaaattcctgaagtacctggaacaccgtggtctgaaagacacctctgagcagaccgtttacgccttcctgggcgacggtgaaatggatgagccagaatctaaaggcgcgatcaccatcgcgacccgtgagaagctggacaacctgtgcttcatcatcaactgtaacctgcaacgtctggatggtccggtaaccggtaacggcaagatcatcaacgaactggaaggcatcttcgcaggtgctggctggaacgtgatcaaagtgatgtggggcggtcgttgggatgagctgctgcgtaaagacaccagcggtaaactgatccagctgatgaacgaaaccgttgacggcgactaccagaccttcaaatccaaagacggtgcctacgttcgtgagcacttcttcggcaaatatcctgaaaccgcagccctggttgcagactggactgacgagcagatctgggcgctgaaccgcggtggtcacgatccgaagaaagtttacgctgcactgaaaaaagcgcgtgaaaccaaaggtaaagcgactgtgatcctggcccacaccattaaaggttacggcatgggtgataccgcagaaggtaaaaacatcgctcaccaggttaagaaaatgaacatggacggcgtgcgttatatccgcgaccgtttcaacgttccagtgaccgatgagcaggtagaaaaactgtcttacatcaccttcccggaaggttctgaagagcataagtacctgcacgaacgtcgtcaggcgctgaaaggctacctgcctgctcgtcagcctaacttcaccgagaagctggaactgccagcgctggaagatttctctcagctgctggaagagcagaacaaagagatctctaccactatcgctttcgttcgtgccctgaacgtgatgctgaagaacaagtcgatcaaagatcgtctggttccaatcatcgccgacgaagcgcgtactttcggtatggaaggtctgttccgtcagatcggtatctacagcccgaacggtcagcagtacaccccgcaggaccgtgagcaggttgcatactacaaagaagacgagaaaggtcagatccttcaggaaggtatcaacgaactgggtgcaggcgcatcctggctggctgctgcgacttcttacagcaccaacaacctgccgatgatcccgttctacatctactactccatgttcgggttccagcgtatcggtgacctgtgctggcaggcaggcgaccagcaggctcgcggcttcctgatcggtggtacttctggtcgtacgaccctgaacggtgaaggtctacagcacgaagatggtcacagccacattcagtctctgactatccctaactgtatctcttacgacccgtcttacgcgtacgaagtggcagtcatcatgcatgacggcttgcagcgcatgtacggtgaagcgcaagagaatatttactactacatcaccaccctgaacgaaaactaccacatgccggcaatgccagcaggtgccgaggaaggtatccgtaaaggtatctacaaactcgaaaccatcgaaggtagcaaaggtaaagttcagctgctgggctctggttctatcctgcgtcacgttcgtgaagcagcgcagatcctggcgaaagactacggtgtgggttccgatgtgtactctgttacctccttcactgaactggcgcgtgatggccaggattgtgagcgctggaacatgctgcacccaatggaaaccccacgcgttccgtacatcgctcaggtgatgaacgacgcgccagcggtggcgtctactgactatatgaaactgttcgctgagcaggttcgtacttacgttccagctgatgattatcgcgtactgggtactgacggcttcggtcgttctgacagccgcgaaaacctgcgtcaccacttcgaagttgatgcttcctacgtggtagtagcagcactgggcgaactggctaaacgtggcgaaatcgataagaaagtggttgcagacgcaattaccaaattcaacatcgatgcagataaagttaacccgcgtctggcgtaagaggtaaaagaagaatggctatcgaaatcaatgtaccggacatcggggctgatgaagttgaaatcaccgagatcctggtcaaagtgggcgacaaagttgaagctgaacagtcgctgatcaccgtagaaggcgacaaagcttctatggaagtcccgtctcctcaggctggcatcgttaaagagatcaaagtctctgttggcgataaaaccgagaccggtaaactgatcatgattttcgattccgccgacggtgcagcagctgctgcacctgcgcaggaagagaagaaagaagccgctcctgctgctgctccagcagcggccgcggcagcgaaagaagtgaacgtgcctgacatcggcggtgacgaagttgaagtcactgaaatcctggtgaaagtgggcgataccgttgcggccgagcagtcactgatcaccgtagaaggcgacaaagcctctatggaagtgccggcaccgttcgcgggtaccgttaaagagatcaagatcaacaccggcgacaaagtgtctacaggttccctgatcatgattttcgaagtggcgggcgctgaaggcgctgcggctccagcgaaagcggaagctgctccggctccggctgctgcaccagcggctgctggcggcgtgaaagacgttaacgtaccggacatcggcggtgacgaagttgaagtgaccgaagtgatggtaaaagtgggcgacaaagttgccgctgaacagtcactgatcaccgttgaaggcgacaaagcttctatggaagtgcctgcgccgttcgccggtaccgttaaagagatcaaaatcaacaccggcgacaaagtatctaccggctctctgatcatggtcttcgaagtggaaggcgcagcacctgccgccgctccagctgccgcggctgctccggcaccggctgctgcaccggctcaggctgctaaaccggctgctgcccctgctgctaaagcagaaaaatctgagttcgctgaaaacgacgcttacgtccacgcgactccgctgattcgtcgcctggcgcgcgaattcggtgtgaacctggcgaaagtgaagggcactggccgtaaaggccgtatcctgcgcgaagacgttcaggcttacgtgaaagatgcggtgaaacgcgccgaagctgcacctgctgctgctgccggtggcggtatcccgggcatgctgccatggccgaaagtggacttcagcaagttcggtgaaatcgaagaagtggaactgggccgtatccagaaaatctcgggtgctaacctgagccgtaactgggtaatgatcccgcacgttacccacttcgataagaccgatatcaccgatctggaagcgttccgtaaacagcagaacgccgaagctgagaagcgtaagctggacgtgaagttcactccagtggtcttcatcatgaaagcggttgccgctgcccttgagcagatgcctcgcttcaacagctccctgtccgaagacggtcagaagctgacgctgaagaagtacatcaacatcggtgttgcggttgatacgccaaatggtctggttgttccggtcttcaaagacgtgaacaagaagagcgtcactgagctgtcccgtgaactgaccaccatctccaaaaaagcgcgtgatggtaagctgactgccggcgaaatgcagggcggctgcttcactatctccagcatcggcggcctgggtaccacccacttcgcaccgattgtgaacgcgccggaagtggctatcctcggtgtgtccaagtccgcgatggagccggtgtggaatggcaaagagttcgtgccgcgtctgatgatgccaatctctctgtccttcgaccaccgcgtgatcgacggggctgatggtgcgcgtttcatcaccatcatcaacaacatgctgagcgacattcgccgcctggtgatgtaatcgaaaagccggccagtcggccggcttttttctgataatctcatggggtttttgaggttattggtgaaagcgataattcgtgagccgtttgttgtttcaaaattgttaacaattttgtaaaatacgggcggatagaacgacccggtggacgacgggtatacattaagaggtcatgatgagcacagaaatcaaaactcaggtcgtagtacttggggcaggcccggcaggttactccgcagcatttcgcgccgcggatttaggtctggaaaccgtcatcgtagaacgttacagcaccctcggcggtgtttgtctgaacgtcggctgtatcccttctaaagcgctgctgcacgtagcgaaagttatcgaagaagccaaagcgctggctgaacacggtatcgtcttcggcgagccgaaaaccgacatcgacaaaattcgtacctggaaagagaaagttatcactcagctgaccggcggtctggcgggtatggccaaaggccgtaaagtgaaagtggtaaacggtctgggtaaattcaccggtgcgaacaccctggaagtggaaggcgaaaacggcaaaaccgtgattaacttcgacaacgcgatcatcgcggcaggctctcgcccaatcgaactgccattcattccacatgaagatccacgcgtgtgggattccaccgatgcgctggagctgaaaaccgttcctaagcgcctgctggttatgggcggcggtatcatcggtctggaaatgggtaccgtgtaccatgcgctgggttcagagatcgacgtggttgaaatgttcgaccaggttatcccggctgccgacaaagacatcgttaaagtcttcaccaaacgcatcagcaagaaattcaacctgatgctggaaaccaaagtgactgccgttgaagcgaaagaagacggtatttacgtttccatggaaggcaaaaaagccccatccgaaccacagcgttacgacgccgtgctggtggctatcggtcgtgtgccgaacggtaaaaacctcgacgcgggcaaagctggcgtggaagtggacgaccgtggcttcatccgcgttgacaaacagctgcgcaccaacgtgccgcacatctttgctatcggcgatatcgtcggtcagccaatgctggcgcacaaaggtgttcacgaaggtcacgttgccgctgaagttatcgccggcatgaagcactacttcgatccgaaagtgatcccatctatcgcgtacaccgagccagaagtggcatgggtcggtctgactgagaaagaagcgaaagagaaaggcatcagctacgaaaccgccaccttcccgtgggctgcttctggccgtgctatcgcatccgactgcgcagacggtatgaccaaactgatcttcgacaaagagactcaccgcgtgatcggtggtgcgattgtcggtaccaacggcggcgagctgctgggtgaaatcggtctggctatcgaaatgggctgtgacgcggaagacatcgcgctgaccatccacgctcacccgactctgcacgagtccgtgggcctggcggcagaagtgtttgaaggtagcattacggacctgccaaacgcgaaagcgaagaagaaataagttgctttgtgcctgataagcgcctcttcggaggtcgttttttttggtttaaagtccatatcttagtgttaattatcaatttaaatgcagaatagataaaatatttgtacatggttaattaaatgtattcgcgaatcaaatgattcatttaatttttaatgggtttgtataagtcgctgtgtttatgttttttttaggagtggcttggttaatttgacttaaaatagaaaggtaatataactatcgctgggattactctattaaaaggaaccagttattatgaatagttatgaatcgacctctggtattcgtgatttaaaagtcatgggggccagaacacaattagggagtggttgggcgagtgcgacccataagcttgtagcccttgataaagagaccctacagccagtcagcgttgactggtggtatgaagatgaatccgcaccgcgctttactggacctgttttcaccgatacccgcccaaatgtacgcttgctggcaaattctgatgtttatcggctgggtgatgttattaatatcagcaattttggtggttcaggttctgcgttagctgccatcaaaaatgacggtactgttgtagcgtgggggatgctagaaaatggtggtacatcacccgtcagtgatcgtaatcatgatgtcaggtcaatttttggtggtatggattcttccgctgccgtaaacgccaatggtcaggtgtttacctggtctgttgatgatattaatcctctgccagctgacgttgcggccctgaatgatatagtggatattaacgtggcccaatactgggatgacaacggaaattatacctatctggcgttgcgagctaataaccaggtcatgcagtggacggatggaatatcacataacgattttccagaagatattgctgagaggaaggatttcatcgctatccagaccacagaatatgccttcgcgggaattaccaaaaatggccatgttatcacttggggggacacatcatatgggggagagattcctgtacatttgaaagaaatgcatgatgtaagcactctttacagtaacgtgggtgcatttgtagcgctcaggtcgtcaggcagtatttttgcttggggcagtatggaatatggtgctgacattccggataacattgctagcctgacggatattgtttccgtataccgtacaagttcaacttttattgccttaagacaaaatggcagtgtggttttttgggggaaaaacagaaatttgaccgaactgccagcagaaattgcaagtctaagaaatatcattgatgtgcaagcagctgttaatggcagttatgcttttttaacttcagagggtaaggtgtactgttgggggcatgttgctcaaaaaatgcccgaggatttgtcagatgtcgtctccctgacatctgcctggaatgcttttgcggcgcttcgtcgtgacggtagcgttgttgcctggggatatgaagatgagggcggagacacaacccccgtcacaaacgaactttatgatattcgcgcaatctattcttgtggatatcgtttttgcgccttgcgcaacgatgatcgtctcttagaatggggcgaagagtccagaacggatataacaaagatgccagcagatttgcagggaaatgttacctatagctttgttaaatgatcgtgctgccaaccccgaaagcgaaacagaaataagtttctctcttgagtggtctccattgcgaacaatggtgatctgaattagatgaagcgaaacctatactggaagctcagttggtgaatattttgtaaaaacatagccgagtgccactgcgcttacccggcctacaaaaatcgtagaccgggcaggcgaggtgctaccggacgtttacggtgccacgggctgccaggatgtatcaggtttatacacggtcaatgcctggacttttctggcggtttcactgccgaggtctgcctgataaaccttgtcatcctggttaacgacaaagctcattacccccgtctgaccatagctcacgggccaggcaaccatcgcaaagccatttttatccggcagaatgcggaaccgataaccgtgatagcccataccaggctccggcgggctgaaggcgggacccagcgggcttggcgcttcgcccggcgagatgggccagtacaggccgtcttttagccctggcgtgctgacaatcttctgcgcatagtggtggttcatggcgtagtagctctgctgtgcgtcgacgtaggcgtgcagcgcttcaatagccgcgagttcgttgcggccgatttcgcgggtcaggatctcatcagccgctttctgcatatcaaattgccagccctcttttttcttcactaccggtatggggagttgccagccgttatcgccaactgacagatgggcaatatcgccgctgatttcggtacgatggttaatcttccagtcacgcaggaatcgagctaccgcctccggatcaaccccttcaggtggcagatagtcgcgccagttatcccccagcaggtcggccatcgcgctctcattctgctcgctgatggccttcgtcagggcattggccgcctgctcaggcgtggagaaagattgctgggcgcaggcgaaggtggataccatcaacaacagcattccaccgatcggtttcatgttcatagcggcttccttaacgacgatggaattcacggtgttcggtatgatgttcggacagctgctggcggctttgcagcccgcgctggtgctgggcctgccagttggccgagcggctgtcgttgccgctcagggcgtttgcccgcagcggctgatgctgaacctgcgtcgggcgtctggtttgcgcaagagtattattcatccgttgtgcgtggggccgcgcgctgtcgtagccgcgatagttgctgcgctgagagagctgcttcagctgctgcgctgacgctgaatgttgcgggaaatgcgcgtcgccatgctgtagctgtgtgagggttttgcccgtcgactgctgtatctgcgccatcgcagcctgccgctggctatcgcggttgaccgtctgctgccgggtagcgctcagccctcccggcactgaagtctgatgatagcggctggcaagctggctattggcgtagggcacgccgttgcggtaggccggattatgctgccagacctgatgattatcggtacggtgctcgccggtgatcttattgaagttattaacattaatattaatgttatcgccgttatgcgaataaccgccgtggtgatcgtcatcatgatcgtgatgatgttcgtcgtcatcgtcccagtctatgttactgaacagcgcataggtagtggctacgccgaggctatagccaaagcctctgacgaaactattggtaaactgctggccgggagacgggggcagatacacaggcggatagctggcgtttggccacgtgccgtaaacggtggaagggttgtaggtagggacataaaccacctgtggatcggctggctcaattttaatcaccgtcggactagccggcgttgacgtcgcggctgtactggcggaggctggcgcagattttttcacggtggtgacggtctgctgcggggtggattgcaacgtgcctgtctgctgcgccagcaggcgcagacgctgcacggaatccatcacatcctttggctgggccagaaaggcgtcgccgaggctctgtacccacgacgggttttctcccatcaacgacattaactgcggaaaggcgaccagcgatttcacgctggcatcccatggctgcccgctgaccgcctgaatagcggtatcgccctgcattttagggttgtcctttgaccactgggcggcctgaatcacgctcgccggataggttgaggccatcagaatttgcgacagcagcgcgtcgggatagagcgcaatgggcgctgtccactgatcaatctgcgcggcggtataggccggagtcgccaccggggcaggttgtgctgtcggggcgggaagctgcggggctaccggcgcaggtgcgggagcgggttccgttgcgcggcttttaacgaacatgacgcccgaggcggcaaacagccccgcactgcaaagcagaacaagaagatgtggtttaaaaggcaacttcatagattgactccaacgagacgagtgcagtgccgtgaggcgttgctgttgccgcgagtatcattcacccgtgttttacagttttaacttttgttgggaaaacctccgaagcatccggataaagagtgtgagtatttattacacaattatatcggatggctgagcaggcgacggacattcagaaggcgataaatgaagttaaccgttttttcattcgaaacaggaaggcgccacgcaaaattgacataatggcttgcaagccagtggggcgtgatgcaaaattcattgcgttggggttgccgcaaatctgccagcacggtgtgctaccaccgcaggcaacaaataaaccgctatcaggcggtttttttgtgtctgaaattcgtctcgtctccccgctacatcatgcttaacgattcagcaaattttttaatgttgcttttttgtaaacagattaacactgtgcagaaatcctgctatgctgcccgacgcggtatcgggcatttaccctacaaactgctgtctcacaggagcgtgaagagaacgcccgccgcatatgacaatgagagcgaggagaaccgtcgtgctagaagaataccgtaagcacgtagcagaacgtgccgccgagggaattgtacccaaaccgttagatgcaacccaaatggccgcgctcgtcgagctgctgaagaacccgcctgagggcgaagaagaattcctgttagatctgctgatcaaccgtgtaccgcctggcgtagatgaagctgcctacgtaaaagccggattccttgccgccgttgccaaaggcgaagccacctccccactggttactcctgaaaaagcgattgaactgctcggcaccatgcagggcggctataacattcatccgctgattgacgcgctggataacgacaagctggcgccaattgctgccaaagcgctctcttcaacgctgctgatgttcgataacttctacgatgtggaagaaaaagccaaagcaggcaacgtttacgcgaagcaggtgatgcagtcctgggccgatgccgaatggttcctgaaccgccctcagcttactgaaaaaattaccgttaccgtctttaaagtgaccggtgaaaccaacaccgatgacctttctccggcgccggatgcatggtctcgcccggatatcccactgcacgcccttgcgatgctgaaaaacgcccgtgaaggcattgagccggatcagccaggcgtggttggcccgatcaaacagatcgaagccctgcaacaaaaaggtttcccgctggcttacgtcggtgacgtggttggtaccggttcttcccgtaaatccgccaccaactccgtgctgtggttcatgggcgacgacattccgcacgtgccgaacaagcgcggcggcggcctgtgcctcggcggcaaaattgcgccaatcttcttcaacaccatggaagatgcgggcgcgctgccaattgaagtggacgtgagcaacctgaacatgggcgacgtgattgacgtttacccgtataaaggtgaagtgcgtaaccacgaaaccaacgaactgctggccagcttcgaactgaaaaccgacgtgctgatcgacgaagtgcgtgccggtggccgtatcccgctgatcattggccgtggcctgaccaccaaagcgcgtgaagcgctgggtctgccgcacagtgacgtattccgtcaggcgaaagacgtggccgagagcaaccgcggttactctctggcgcagaaaatggtgggtcgcgcctgcggcgtcactggtatccgtcctggcgcgtactgcgaaccgaaaatgacctccgtggggtctcaggacaccactggcccaatgacccgtgatgaactgaaagacctggcgtgcctgggcttctcttccgatctggtgatgcaatccttctgccacaccgcggcgtatccgaagccggttgacgtaaccacgcaccacacgctgccagacttcattatgaaccgtggcggtgtctccctgcgtccgggcgacggcgttatccactcctggctgaaccgcatgctgctgccggataccgtcggtaccggcggtgactcccatacccgtttcccaatcgggatctccttcccggcgggttccggtctggtggcgtttgccgcagcgaccggcgtgatgccgctggatatgccggaatcggtgctggtgcgcttcaaaggtaaaatgcagccgggcattaccctgcgcgatctggtgcacgcgatcccgctgtatgccattaaacagggtctgctgaccgtcgagaagaaaggcaagaaaaacatcttctctggccgaattctggaaattgaaggtctgccggatctgaaagtggagcaggcgttcgagctgaccgatgcctcagccgagcgttctgcggcgggctgtaccatcaagctgaacaaagagccgattattgagtatctgacctccaacatcgtgctgctgaagtggatgatagcggaaggctacggcgaccgtcgtacgctggagcgtcgtattcagggcatggaaaaatggctggcggatccgcagctgctggaagccgatgcagacgcagagtacgcggcggtgattgagatcgatctggcggatatcaaagagccaatcctgtgtgcgcctaacgatccggacgatgcgcgtctgctctctgacgtacagggcgataagatcgacgaagtgttcatcggctcctgtatgaccaacatcggccacttccgtgctgccggtaagctgctggatacccacaaaggccagctgccgacccgtctgtgggtggcgccgccaacccgtatggatgcggcgcagctgaccgaagagggctactacagcgtgtttggtaagagcggggcgcgtatcgaaatccctggctgttccctgtgtatgggcaaccaggcgcgcgtggccgacggtgcgacggtggtttccacctcaacccgtaacttccctaaccgtttaggaaccggggcgaacgtttacctggcctctgcggagctggcggcggttgcggcgctgattggcaaactgccaacgccggaagagtaccagacctttgtggctcaggtagataagacggcggtggatacttatcgttatctgaacttcgaccagctctctcagtacaccgagaaggctgacggggtgatcttccagaccgcagtataaatgctaccctctcccgtgggagaggggctgggggtgagggcaccagaccgctccgcacctgacccattgcccggtggcgctacgcttaccgggcctacaaaacccatcgcaacgtcggtgggttttttattttcattcctcccgcctctcccgctttttttcttcctctctgctgcgataattaccctaatggctttgcagaggaaaacgctatggattacgaatttttgcgcgacatcaccggcgtggtgaaagtgcgaatgtcgatggggcacgaagccgttggacactggtttaacgaagaggtgaaagagaacctcgcgctgttggatgaagtcgaacaggcggcggaaacggtgaaaggcagtgaacgctcctggcaacgcgccgggcacgaatacacgctgtggatggatggcgaagaggtgatggtgcgcgccaaccaacttgagttctcgggtgatgagatggaagaggggatgagctactacgacgaagagagcctgtcgctttgcggcgtggaagacttcctgagcgtgttgaacgcctaccgcgattttatgcaacagaagtaattccccgaagcgtccctgctccggatcacgtttacacggtcggaatgttacggccgtagtaaatttcgcgcatctctttccagagcaggtcggtaatgaccttacgctcttcgtcacttaaatcttccggcctggtatggaacatatagtgcttaagatcgaactctttaagcatcatcttggtatggaagatattctcctgatagacgttcacatccatcatgtcgtacagcgacttcatgtcctcggacatgaagttctgaatggagttgatctcatgatcaatgaagtgcttcatgccgttgatatcacgggtaaaaccgcgcacgcgataatcaatagtgacgatatcggattccagctggtggattaaataattcaacgcattcagcggtgaaatcacgccgcaggtcgacacttcaatatccgcgcggaaggtacacagcccgccttccgggtggctttccgggtaggtgtgcacgcagatgtggcttttatccaggtgggcgactaccacttccggcagcgggccggggtgctcggttttgtcgataagcttcgggtcaaccggctcttcactcaccagaatggtgacgctcgcaccctgaggctcataatcctggcgcgcgatattcaggatgttcgcgccgataatcgagcaggtctctgtcaggatctcggtcagacggttggcgttgtagagttcatcgatataggcgatgtaaccatcgcgctcttctgctgttttggcgtagcagatatcgtaaatacaaaaactcaggcttttggtcagattgttaaagccatgcagtttaagctttttcaattagttcacctcctttgaggacagcgcgtcttgcagatattgaggcaacgcaaaggctgcggtgtggatcgccgggttgtagtaccggcactggagtccggcctggtggaagcgggcctgcacgatctcggtagagagatggcgcagaacgtcgttatccgtcgcccaggcaaaggtcatgatcccaccgtagtaagtggggatcgccgcctggtagaagctgacgtcagcaaaataggtgctcagcttacggtggctatcaagcgcttcatcctgttgcaggaagcaaacgccgttttgcgccacaaaaattccgccaggcttcaggcagcgcttgcagccttcgtaaaacgacgaggtaaacagcgacgcgcccggaccgatagggtcggtacagtcagagataatgacatcaaacgtttgcgtagtctggttaacaaaattgacgccatcatcgataaccagattaaaccgcggatcgtcatagctgccggcattatggttgggcagatactggcggcagaacgacaccacaccggcgtcgatttccaccatggtgatggtttcgacattctgatggcgagagacttcacgcagcatcgcgccgtcgccgccgccgataatcagcacgtccttcgcgtggccgtgggccagcagcgggacgtgggtcatcatttcgtgatagataaactcgtcgcgctcggtggtttgcaccacgccgtccagcgccatcacgcggccaaaggcggcgttttcgaagattatcaaatcctgatgatcggttttctcatgatagagcacgttatccacggcaaaatactgaccaaactggtcatgcagcgtttcttgccataccgttttttcggtcatggggagcacctccttcgttaacatccattacatccggcagttgggcgcaacacaacaccgccgtgaggcggttagcgggtcaacaaggggcgtcgggaaggttacttcacgtaggcgagcaggctgagtgaatcgcgagccagcgctttgcattttttagcagtgggaatgccaataccgcttaaatcacggtagctgtcttcaccgagcgccttcatgtcgaagctgtcgtagttactgaggtcccattggttctgctgggcaaaaaagaccagtgcgcgacgaatttgcccattgggtaaattctggtaaccacaatcgtttttcagaaaaacaaaaactgccgtcagatcggccatatcttccgcttcgttttcacttagcgcgtaactgttcgcacacatcgccatcaggctggcgaacaaaattgttctgaaaaacgtcttcattgcctttaccactgcatcacggaaaattaacgttagcatacttgatgccaggccgacgatctttattattgccgccgtgcttgaccttccggtaaggggagggtttatgctcaaaagatcgcctgctggaaataaggaaatgcacatgcaacgtcgtgattttttaaaattttctgccgcactgggggttgccagcgcgttacctctctggagccgcgccgtttttgccgccgacagaccggctttacccattcctgaattactcgccgcagatgcccgcagccgcattcagcttgtggtgcaggccggtaaaaccacgttcggtcagcacgccgccacgacgtggggctataacggcaatctgctcggcccggcgttgcagttacgcaaagggaaggcggtgacggtagacattcataacacgcttgcggaagagaccacgctgcactggcacgggctggaagtcccgggcgaagtggatggagggcctcagggcattatcaggcctggtggtaaacgcagcgtaacctttactccggaacaacgcgcggcgacctgctggttccacccgcatcagcatggcaaaacgggccatcaggtggcgatggggctggccggcctggtgctgattgaagacgatgaaagccgcctgctgcgcctgccgaaacagtggggaatcgacgatgtcccggtgattgtgcaggacaaaaaattcaacgctgacgggcaaattgactatcagctggacgtaatgagcgcggcggtaggctggtttggcgatacactcctgaccaacggcgcgatctacccgcagcatgccgcgccaaaaggctggctgcgcttacgtctgcttaacggctgtaacgcccgctcgctgaacttcgccaccagcgataaacgcccgctttacgtggtggcaagcgacggcggcctgctgccggagccggtgaaggtgagcgagctgccgatgctgatgggggagcgcttcgaggtgctggtggatatcagcgatggcaaagcgtttgacctggtgaccctgccggtcagccagatggggatggccgttgcgccgtttgataagccgcatccggtcctgcgcattcagccgctacagatcaccgcctccggtacgctgccggagaccctcaccacgctgccagcactcccgtcgctggacgggcttacgcagcgtaaacttcagctttctatggacccgatgctagacatgatgggcatgcaggcgctgatgaagaagtacggcaatcaggccatggcgggaatgcatcacggccagatgatgggccatatgaatatggaccacggtaaaatgggcggcatggatcacggcggccatggtttcgatttccacaacgccaaccgcatcaacggcaaagcgttcgatatgaacacgcccatgttcgccgccacgaaagggcagtttgaacgctgggtgatttcaggcgaaggcgacatgatgctgcacccgttccatatccacggcacgcagttccgtattctgtctgaaaatggtaaagcgccggaggcgcatcgtgcgggctggaaagatacggtgagggtggaaggcggcgtcagcgaggtgctggtgaagtttgaccacgaggcgccgaaagagtttgcctatatggcccactgccatctgctggagcatgaagatacggggatgatgctcggttttaccgtataaaaaaagccgggtggcggcttcgccttacccggcctacatagggcacccgtaggcccggtatgcgttagcgccaccgggctttttcgttacttagcgtcgtcaggcagtgcatacgcgacaatatagtcgcccatcttcgtgccaaacgaaccgtgaccacccgcagagatgacaacgtactgcttgccattcacttcataggtcatcggcgttgcctgtccaccggctggcagacggccttgccacagtttctcaccgttggtcatgttgtacgcgcgcaggtagttatctgcggttgccgcgatgaacagcacgttaccggcggtggagattgggccacccagcattggcatacccatattgaaaggcactggaacaggcatcgggaacggcatgctgtcctgtggcgtaccaatacgtttcttccagacgatcttgttggtcttcagatccagaccggagatataaccccaggcaggctgtttacacggcagaccaaacggagacaggaacggattcagggtcacaccataaggaacgccatactgtggctggataccggcttcggtaccgctgcctttcgcatctttcggctgctccattgggttacccggaccacgagggatcaggcgggaaacgaacggcagcgccattgggttagcgatggcgacctgacggttagggtcaacggagatcccaccccattcgaacatccccaggttacccgggaagaccagcgtaccctgctctgacggcggggtgaaaatcccttcgtagcgcagctggtggaacatcacgcggcataccagctggtcaaacatggtggcaccccacatgtctgcaccgctgagatctttcttcggacggaagctcaggtcagagaacggctgcgttttggtgacgtagtcgcctttggccgcaccctgcggaaccggtttttccggcgcaggaacaaccagcttaccgttgctacgatcaagcacgaagatgttaccggttttcgccggggcgtaaatcaccggtacggttttaccgttaacggtaatgtccgccagcgtcggctgggacggcatatccatatcccacagatcgtggtgaacggtctggtagctccatgccagtttaccggtcgttgcgttcagcgccacgatggagctggcgtaacgttcctgctccggcgtacggttaccgccccagatatccggcgtggtcacgcccatcggcaggtagaccaggtccagcttcgcgtcatacgctgccggtgcccaggagttcggtgagttaaaggtaaaggtgtgttcatccgatgggatcgcgttaggatctttcgcgcccgggtcgaaggcccacagcagtttaccggtgttcacgtcgaaaccacggataacgccggaggtttcacgggtggagaagttatccgttaccgaaccggcaatcacgatggttttatcggtgatgattggcggggaggtcggctcatacaggcccggcgtggtgtccggcatgttggtctgaagattcagaatgcctttattggcgaaggtttcgcacagcttgccggtctcagcgttaatggcaaacaggcggccatcgttcaccggcagcataatgcggcgaggacagtcggcaatgacttccgggctggcattatcggcgcgcgcttcgtggtaagagacgccgcggcaggtaatgtgctggaacgacgggttggagttcagctgtggatcaaagtgccatttctctttaccggtagccgcgtcgagcgcgaacagacgctgatgcgccgtacacaggtagagcatgttgcccactttaatcggggtcacttcgttggtcagctcacccggatcgtttggcatcttcaggtcgccggtacggaatacccaggcttccttcaggtttttcacgttgtccgcgttgatctgcttcagcggggagtagcgttgaccttcctggttacgaccataagcaggccagtcaccgtccgccacctgcgaaatagccgcagccggcgtggattccgcgttcagcgtaccgttgatctcctgcgggtcgttaaaaccggcccaggtcaggatgccgccactaatcagcagggcaacgaccagaccggccacggcgccactggaagggacgatcagacgacgccagacaaacggcaggatcagccagataccgaagaagaccagaatgtcgctgcgcggcgtcaacgcccagaagtcgaacccgacttcccagacgccccagatcatggttgcgagcagtaacgctgcgtacagccacagagcagattgttttctgcgtaaaagcaggacggttacgccaaccataaccagacccgcaatcgggtagtaccaggagccgccaatcgcgaccagccatacgccaccgattaacaaatacagcgcgcagaatgcggcaaacgcggctgttaatgtcaccagtagacgcggctgtttagtttttgtttcagccatagaaaagtactcgtcagttttgttaattatttgctagcaattaattataggtattaacaactgtgatcggaatcacaaatattgctttttataactcatacgccaggcttatccatttactggtataatggctggcttgcgtatcgatgccggagcgagagtcatccgcattgagagattttcactaaaatcatttggttagtaatatgaaacatactgttgaagtgatgatcccggaagccgagatcaaagcgcgtatcgccgaactgggtcgtcaaatcaccgaacattacaaggacagcggcagcgaaatggtgctggtcggtctgttgcgtggctctttcatgttcatggcagacctgtgccgtgaagtgcaggtgccgcacgaggtcgattttatgaccgcctccagctacggcagcggcatgtccacaacccgtgatgtgaaaatcctgaaagatctggatgaagatattcgtggcaaagatgtgttgattgttgaggacatcatcgactccggcaacacgctctctaaagtgcgtgagatcctgagcctgcgtgaaccaaaatcactggcgatttgtactctgctggataagcctgagcgccgtgaagtgcaggtgccggtggagttcgttggtttctccatcccggacgaattcgtggtgggttacggcattgattacgcgcagcgttatcgccatctgccgtatgttgggaaagtagtgattctggacgaataattgcgggctgatgccctcaccccagccctctcccacagggagagggtgaaaaaccccggctttgttatttatggttaacgtgcttaagcttgaggttggcaattcccgagcggtaacgctgttccagcgtttcgcggttggtggcggtcacttccagattgcgtagcaggccgtcgtgaataccgtacgcccagccgtggatggagaccttctgtccgcgtttccaggcagactgcataatcgtcgagtggcccaggttatagacctgctccatcacgttcagctcacacagcgtgtcgagacggcgctcctgcggcatttcgcccagcagtgagctatgtttgaaccagatatcacggatgtgcagcagccagttatcgattaaccccagctctgtattttcgaccgccgcctgtacgccgccgcagccgtagtgaccacaaataatgatgtgctcaacctccagaacgtcaacggcatactgaacaaccgaaaggcagttgagatcggtatgaataaccaggttagccacattgcggtgaacaaacagttcgcccggttcaagaccggtcagacgttcggcggggacgcggctgtcggaacatccaatccagagaaagcgcgggttctgcgcttgcgcgagttttccaaaaaatccggggtcttcctccaccagcatttttgaccatagtgcattgttgctgatgagtgtatctatgtcgttcatggaggttagcgacctgtaaccaagtgattgcgttgcgctactatagggtaacccgacttttaatgaaaccacacaacgtgtgtcagaacttaaggtaagttgaattcatggcgattgcactggagctnnnnnnnnnnnnnnnnnnnnnnnnnnnnnnnnnnnnnnnnnnnnnnnnnnnnnnnnnnnnnnnnnnnnnnnnnnnnnnnnnnnnnnnnnnnnnnnnnnnnnnnnnnnnnnnnnnnnnnnnnnnnnnnnnnnnnnnnnnnnnnnnnnnnnnnnnnnnnnnnnnnnnnnnnnnnnnnnnnnnnnnnnnnnnnnnnnnnnnnnnnnnnnnnnnnnnnnnnnnnnnnnnnnnnnnnnnnnnnnnnnnnnnnnnnnnnnnnnnnnnnnnnnnnnnnnnnnnnnnnnnnnnnnnnnnnnnnnnnnnnnnnnnnnnnnnnnnnnnnnnnnnnnnnnnnnnnnnnnnnnnnnnnnnnnnnnnnnnnnnnnnnnnnnnnnnnnnnnnnnnnnnnnnnnnnnnnnnnnnnnnnnnnnnnnnnnnnnnnnnnnnnnnnnnnnnnnnnnnnnnnnnngcgattgcactggagcttgaacagctcaaaaaaacctacccggggggcgtccaggcgctgcgcgggatagatcttaaagtcgaagcgggagatttctacgcgcttctggggccgaacggggcgggaaaatcgaccaccatcgggataatcagctcgctggtcaataaaacctcgggccgcgttagcgtgtttggctacgacctgcaaaaagacgtggtcaacgccaagcgccagctggggctggtgccgcaggagttcaacttcaacccgtttgagacggtacagcagattgttgttaaccaggcgggttactatggcgttgagcgcaaagaagcgctggagcgcagcgaaaagtatctcaaacagcttgacctgtgggagaagcgtaacgagcgcgcgcggatgttgtccggggggatgaagcgccgcctgatgattgctcgcgcgctgatgcacgagccaaagctgctcattcttgatgaaccgaccgctggggtggatattgaactgcgtcgttccatgtggggcttcctgaaggatctgaacgacaaaggcaccaccatcatcctgaccacacactacctggaagaggcggagatgctgtgccgcaatatcggcatcattcagcacggcgagctggtggaaaacacctcgatgaagaacctgctctccaagctgaaatcagagacctttatcctcgatctggcggcgaaaagcgccctgccgaagctggaggggtataactatcgcctggtcgatacctcgacgctggaggtagaagtgctgcgcgagcaggggatcaacagcgtgttctcccagttgagcgcgcagggcgttcaggtattaagcatgcgtaacaaagcgaaccgactggaagagctgtttgtctctctggtgcacgataaacaaggagacaaggcatgacgcatctttactgggtcgcgctgaaaagcatctgggcgaaagagattaaccgctttatgcgcatctgggtgcaaaccctggtgccgccggtgatcaccatgacgctctacttcatcattttcggcaacctgattggctcccgcatcggtgagatgcacggcttcacctatatgcagtttatcgtgccgggcctgatcatgatggcggtgatcaccaacgcttacgcgaacgtggcgtcctcattcttcagcgccaagtttcagcgcaacattgaagagctgctggtggcgccagtgccgacgcatgtcattatcgccggttacgtgggcggcggcgtggcgcgcgggctgtgcgtgggtattctggtgacggcgatttcgttgttcttcgtgccgttccaggtgcactcgtggctattcgtcgcgctcacgttattgctgacggcgatcctgttctcactggctggcttgctgaacgccgtgttcgccaaaacgttcgatgacatcagcctgatcccgaccttcgtgctgacgccgctgacctatctgggcggggtgttttactccctgacgctgctgccgccgttctggcaggcgctgtcgcacctgaacccgattgtctatatgatcagcggcttccgctttggtttcctcggcattaccgatgtcccgctgttcaccaccgttgtggtgctggcggtatttatcgtggcgttctatctgctgtgctggtatctgatccagcgtggacgtgggctgcgtagctaatcttctgcccggcgacgttctgtttgccgggcactttctttgacagttatcaccgtaaactaaccttcacctggataaactactcgcctgctaaggagagacgatatgctgggatgggttatcacctgccacgatgaagaggcacaggaaatgctcctgaagctggaggcccgatttggccctctggcgcaatgtcgtgcggtaaattactggcgagggctgagcaccaatatgctaagccggatgatgtgcgacgcgctgcatgaaaccgacaccggtgatggcgtgatttttctcaccgacagatcgggcgcggcgccttaccgttcagcggcgttaatgagccataagcatgataactgtgaagtgatctccggtatcagcctgcctttactcgaagcgatgtatccgctgcgcgcaacgttgagcagcgctgagtttcgtcacgccattgtggcgcagggctcgccgggcgtgagcagcctgtggcaccagcagcagaagaatccgcctttcgttctgcttcacgatctgtataagcattaaacattggtattgatgtcgcttttgctacaatggcgactgattttccgtatcgatttatatcccatgctcatgcgcgttatctttatccttctgctactggtctccggtggtgcgtctgccagcctgaccagtcagcaaggccttcctgcccaatatatgcaaaccaccgaagatgcggccatctgggcgcaggtgggaaatgccgtcgtgaacgtgggcaatgtccgcgccgggcagatcctcgccgtctttccggccgcggcggattactatgaatttcgtttcggattcggtacggggtttattgataaagagcacctggaaaaagtgcagggtaagcaacgcgttgaggatagtctgggcgatctgaacaagccgctcagcaatcaaaacctcatcacctggaaagacacgccggtgtataacgcccccagcagcggaagcgcgccctttggcaccttaagcgccaatcttcgctatccgattctgaataagctgaaagatcgcctgaaccagacctggtttcaaattcgcatcggcaatcgtctggcgtggatcagcagcctggatgcacaggaagataacggactgccggttctgacctaccaccatatcctgcgtgatgaagagaacacccgttttcgacatacctccacgacaaccagcgtacgtgcgtttaataatcagatggcctggttacgcgatcaaggctataccacgctgacgatgtaccagcttgaagggtacgtgcgtaacaagatgaacctccccgcgaaagcggtggtgatcacttttgatgatggcctgaaatcggtgagccgctacgcgtatccggtgctgaaagagtatggcttcaacgcgacggcgtttattatctcatcccgcatcaaaggtcacccgcagaagtgggatccccgatcgctacagtttatgagcgttcaggaaatcaagggcatccaggatgtgttcgacattcagtctcacacccactttctgcatcgcgtggatgggtataaacaccccatcttattgagccgcagctatcacgtgatcctgttcgattttgaacgctcacggcgtgcactggcgcagttcaacccgcgcgtgctgtatgtttcgtacccgtttggcgggtatgacaataaagcgattaaagccgcgaatgatgccggttttcatctggcagtgacaacggtgaaagggaaggtgaagccgggggataatccgttcttactgaagcggctgtatattctgagaacggattcgctggagacgatgtcgcggctgatcagcaatcagccgcaggggtaggttattcgtacgtggtctgaatagtcacggtggtaccgaaaacaccgacggttaccggatcgctaccggttttgaccaacgtggcccaaagtgatctgtcaataatactaacaggatccccaacaacctctcctatagcaatgacacgttggtaactgtctgccggcacggggtaaatagaattttcagaatccgtaatcatgacgccgacgcctcctgccgcagtaacaccacctgtattctcgacggtattggtaaaatattttttatctgcggtggtatgtgtggaggataacgtatagtaaacagcggttgtatttacacatgtacccgtaacatggaactcgactttgctggtattcccgttttcgacttctgcgggataccagtcaccaaggtttaccgttgtgggcgcacgtaagacacaggtcgggcgatttaaaggcatgctgaatgacatttcgctcatgttcacatggggacgagggtgatcggatgtatccggattgcttggatcacccagaatgatctgaccaatggggcctgcaccggccgttaaaaaattaacatccgaaggaacaccctggaatccgttggtttgatagatttccatgcgcacatgccaggttttttcgtcaagcagctcttcgtgatcgtcattaggtgcggtcatataccaggagcccgcgttgggcgggaaccacgcggtgacgccattaccatcgggatacatcgccagggtatagacaatacccggaatattcgtccggaaggtggccttgttatctatgtagccttccagcattgagttgtcggtaatctgataggtgttttcaccgtccgctccacctgcacaatgggattttaacgcaggcgttgtttccataatgatcgtattactgatctgtatgggagttgttactgtgcccacaggcagaggagtgataaccggttgtgcgcccggagacataatcagcaggtcatcatgaccgtaaaatttgcactcctcgaaattagcctttgctgcgccagacattccgagcgccgcgaacgctaatatgctgagatattttttcattctaaatccctttattcgtagctgacattaaccagaacattactcataaccacaccgctggtgatcgttccaatattctgataacgtgcgtaaaagccataatcctttatatagttctcactacttccaccgacatcgtaaataacgtttgatgtcccgtcgctgttcaggacgttagttttgaacgtatctgaaaaaataacgatacccacattttcagccgcaccggctgtggcatcgtttttaaacacctggttgtgattactccagaaaccattttgcggagcaaaactaaattttagtttgttaatcgttgcgccttctgtactgctcgcatagcagtcatctacgtggatggtaaaaggcgtaccagcttcatcatcgtttggcgataaacgatcgctcttgtcgctgttataaaaccagtctcgtgacacggtcggcaaagtgatctctccgccgttttcgacgcttagccgacaggtattattaacgatgtttgctgtcaggtttacatccatacctgaacctgcctggcttacgccaggcagagtgctaccagccagaccgataagcaacacaagaccgggctggtgtaaattaaacggtgattgttgcataatggttcctggaattattgataggtgactgtgaaggttactggcgcagtaacggcacctgtgccaacatcggcaatatttctgtctttcgcaatcacaatgcgtgagttcatcgggaattcccctacaccgtcagcaatggtgacctcctgtgccgccggaggccttttgcaactcaacattacgccagtatctacaactcctgaccagatttcgaagcctgttgctaacccagcagaataagaatctccgtccgttttcggacccgagcatcccccacctgcaccactcgctgcggctaccgttgccttagttacaccagagcagtttgtaaaggcaatttttaacggctcgacacgagtcttatttaccagatcggttttatatacgtcgccaaacgcaatttcagtggacgcagttcctgcaccgttaagcacttttgctgtacacgtgcccgagactatttttgattttatcgttaatttaacactgtcagtacctgtaattgctgcgtttgccattcccgaatacagaagtgcagaaacggacagggcgataaaagtagatttaaatttcataatgttgctccgttttcctgcaccaattactcgtagctaaattcaaaagtcgcagtagcctcaaaatcaccaactgtcatgctattaactttggtttcacgtattgtggctactaaaggaacttctttattctggatttctgttgcactccagaccagtcgcttagcatcatcgtcagagttgatgataaaaggggcctccggtgcgctggctctggcaatttcaacagcagagaaatctgcgcctccatcggcttttggtttttgattaacaaggccgctaagcaaataacccgattggcttccttttaccgtggctttcagtgaggtcagagaggccgggcattcaacaatcacaattttgaaattggcatttgcggtgccagctttgacatcgtcgagacgcacctggccgccgttaccaatgagcagtgtttgatccgtatcggaacccgtaccgcccatcagtttcatatcacaagtggtttcacggatattggccgtaaagttaacatcgagattcgtgccctcggcgagcgccgaacctgataacgccagcatcgttacggcaacgactgacaggctataaagattttttttcatacaaactctcgtctattttcccgaataattacatctggcacacttgattgctgagcaccgttgtaagtcctactttttgagcatgtgatgagacgttataatgcacgtcacatttactgtctttatcgcttccccagacaacatgaagcgtgccttcatcctcaacgccgcggacataggcttgccccgcctgtcccacggtgccaatagattcatttttttcatttaaaacatcagcgcctaaaggaataaatccgttatcggtgcgcttaagttctaaaattaatgaacgaccttcatcggttgcaaaatcaaccagcacaacggaaccactgcggggaaccgtaatttcactggtgtttttaatttcaacgtcgttttccagcgtgctgatatcaaggtatacgcggttttcacggtaggcagacatataaggcagaatgccatagccggaactgcctatttcgctgttaccaaagccgataccggcgcctttcgcaccactcgctttgaccagtgccagcgcatcgttgtcaccaatactccctggcgcaaatgcaatacctcctgaatggatgaccatgccaccgttataggaggcagaatattgtttactgttgtcatcaccaaaagaggcagataaccccagcgggccatattcactgttataggacccgtagccgcttatctgattcaggtcaccataattaccactgtttgacgaggcgctaacggaataactcaccttattatcttgcgtatttccacccgcggacgtgttaaagcttgtgccgcctttaaggtcggaacgtaatcccatattgatgtttgagaatccaccggcattccctctatcttttgagaatacacttaatggaatgcttaggcttaaataaacgctatcgtctttcttgccgttctgatcataggttcgctgtaatgacaagctgtagctgccgtaggtgaagctattgttatacccaatattgtaattggaagtagagcccgtcgcgttccagtaatcctgccaggtgccgcttacatacagggagccaaaattgtcttctccggaggttagcggttggttaagactaatttgcacctggtttttggtgcgctgatagtctgcatatagcgcttcgtttgagtcatagctacggtttgagtacttctggtgcctaatactgtcctgaagttgcgccgcatcgttaagcgtcaggtagtcttccgtcgagaaacgataagccgcaacgttaaaggaagtattcgtcgactcaaacattttgctgtaggttaaacgataactttgcccgcttaatttatccagcccctcaatatctgcataagattgcgtaacgtcgaatgcaaacgcaccaacaggggtgttcattgccacgccgagaataccggcataaaaatccatgtcggtatattgcgcgccaatataacccgtgaacgtattattcaggccatagtaaagcgtaccgtaacccactttaggcgcatcaatcagtgaatcgtcatttaattcacctaaaccgacgtcccagcgagatgctcccggacggagcatctgcgtgacggatgaaaagggtacggtaaaggagcgtttgctgccatccgcttcttcaatcgttaccagtaaatcatttccgtaacctgtggtactcaggtcgtttatttcaaacgcgcctggtggcaccgaggtttcataaatcttattgccgctctgcgtgacgctgaccttcgcgttactgttcgcgacaccccgaatgacaggcgcgtagcctgtggaccccattggcaacatgcgatcgtcactgtacatgcgtgcgccgcgaaggctcatagagttaaatgcctcgccacgcgtgtaagagtcgccgatgacaaactgggcactcaatggtgtgatatcgcgctgcaaatagacatcctgactggagtattttgtgccgctatctttgtcccagttaaaattgccacgcgagcgcaggcgccatggccccatattcagaccatagcgtaaccctacatatgcactttctgatgtactgccgttgttctcgctacgccagccgttcatgtcataagagagcagagcggcaggaattccgttatcccacaacgatgggtcgacatatcccgccgggcgtttcagcacataaatctggggaaaattaaaatccataacctgcttgccactgtcatagctaaccgtagcgccagcgaaagattttttaatatcgacgcagctttcatcgtcttccggtccgtcaggcaatgtgctggtgtcgacacccgattgtgacagcagcagttttgttatgcacggggtcgcacgaggtgttccgttatctttaaacgtgacctccacggtggacttcagtttaccgttcaggttgatcttagtgcgataggtccccggtaaaaccgggttgccatgtgaaaaacgattaatatcaatattagcgctgccatttaaaagaaattgatcgttaaactcgacctcttcttcattgtcaggcagatcttttgctggcgtgatattttctgcacaggcataaaaaggcaatgctgcacttatcgtaagacataaaagagaacgtttaaataacatggcacatccacttaatcagtgcagagagggtgctctccacagagttaatgctattaattattatatgtattaaagggtgctctattttagtcccgcttcgtgatggtctgtgccgccatagtcattaatagaatcaaactctactttaccatttacggcagaagctaaacctttaaccgtcattgtggtatcactgaacggtggaacggccttatgatcaacgtcgtatgttttttgactggctttaatggttaccgccgaaacggagacgttatacggtgaattattatgggcaacaagcttaaccgcgtttccttcttttttctgcgtccatgtcaaatgctcagctgcttcacctgccgagccttttaacccgtcaggacggtaaaagaatttaatacgtgttctgaatgccagctgaagctggttaagattctctttatccgcagcttttgattttggtggaatctccaggacattgaaccagaaaagcgattcacgatcctgtggtaaaggtgtacctgtgtaggtaatacgtacggattggccttttttcgggtcaatacgggatactggaggggtaatgataaaaggaagctttaactcttccggatttacgccatcacgcccatcatcaagccaggtttgaaccaaaagcggtttggttccatggttatcgagattaacaacaacatccttcgatgactgtggatagataatacgggtgccggaaataacaatatccgcacttgcattcgatgtggccaaaacggcagttgcgagcaatacggcttgaaaacttttaatgaagactgaatgagacattttttccacttccttttggaattacacaagcaatccctcattcatcatgaaggattgcttaatttaaagtttacgaatctcttattcgtaaatcatggtgaaggcaacctgtgcctgcacggtaccagcagaaactggattacttgttgcatcccaaccctgaccctgggtgtacgctacgcggtagtacaggtttcctgcgccagaagtttcatcgatggttgctttctgggagttgttagtctggtcaattttgatctgatcgacagctgagttaccgtcgtttgacagcaccaggttaacgttcttagctgaaccctgagcattgcttggtggaaccagcagaccgccttcggtagaagaggagccagcccaggaagagaactgtgcagatgctttcttcacagttgcggtatcacaaccggtcagtgaaaggctgaatttcttttcacccagggtgctggtgctacccagtgcgtttgcgaaatcacgcacaaatacagtgtccagagtcacatcaaaatcgttaccgttctgatcgattttctggtcaagggagacctggcaagtattgttagaaaccatgccgtggaaagtaatagtgccggtgtcaggatctgccgctaccgctgaacccgcagccaatacgcttgccatagcaattgccaaaccatattttttagaaannnnnnnnnnnnnnnnnnnnnnnnnnnnnnnnnnnnnnnnnnnnnnnnnnnnnnnnnnnnnnnnnnnnnnnnnnnnnnnnnnnnnnnnnnnnnnnnnnnnnnnnnnnnnnnnnnnnnnnnnnnnnnnnnnnnnnnnnnnnnnnnnnnnnnnnnnnnnnnnnnnnnnnnnnnnnnnnnnnnnnnnnnnnnnnnnnnnnnnnnnnnnnnnnnnnnnnnnnnnnnnnnnnnnnnnnnnnnnnnnnnnnnnnnnnnnnnnnnnnnnnnnnnnnnnnnnnnnnnnnnnnnnnnnnnnnnnnnnnnnnnnnnnnnnnnnnnnnnnnnnnnnnnnnnnnnnnnnnnnnnnnnnnnnnnnnnnnnnnnnnnnnnnnnnnnnnnnnnnnnnnnnnnnnnnnnnnnnnnnnnnnnnnnnnnnnnnnnnnnnnnnnnnnnnnnnnnnnnnnnnnnnnnnnnnnnnnnnnnnnnnnnnnnnnnnnnnnnnnnnnnnnnnnnnnnnnnnnnnnnnnnnnnnnnnnnnnnnnnnnnnnnnnnnnnnnnnnnnnnnnnnnnnnnnnnnnnnnnnnnnnnattgccaaaccatattttttagaaatcatttaaatatccatattcgttgagtgaataataagtgcccgtaaatcttttatttgaaattaaatttcgtggcgaattatattgttaatctcaatgaaatatagatgttgtgcgtgatttaaactaaatgaatagtttagtaaatttaaaattatttgttatcaatgtgatgggattgtctggttgtgcggggagagtttgaatattaattctataaatgctttttaaagacccattcatttaataaatgcgcaggaatgggtcgtgggataaatattatcaggcaacctgtaccggaatcgccttcgcggtacgtttcatctcattgtcgccttcaaagtaggctacttttggctgccagcgacgcgcttcttcgtcagacatcatgacaaagctggcgataatcacgatatcgcctacgtccgcgcagtgcgccgccgccccgttgacggagatgattttggacccgcgctcagcggcaatggcgtaggtagagaagcgtttgccgttatttacgttccagatatcaatggcttcgttttcgagaatacccgccgcgtcgagaaaatcctggtcgatcgcgcaggagccttcataatgcaggtcggcctgagtgactttcacacggtgaagcttaccttgcagcattttgcgaatcattacgtttacctttcatcttccgggtagaaaaactacgccagctcaaccactttgttatcgataaggcgggcctggccgagccatgccgccaccagaattaccgcacgtttgctggtctctgtaagtgccagaagcgtatcggcatcccgaatttgaacgtcgtcagcacgaagacctttctcgttcagcgcctgttcagccagggcgataatctcttctgctgttaactcttttgccagcagttgctctgccatcgtattcatgactttgcttaagcccggcgcaattttacgctgttcggcggtcagatagccgttacgggaactgagcgccaggccatctttcgcacgcacaatcggtacgccgacgatctcgatgtcgtagcccatgtcggcaaccattttgcggatcagcgccaactgctggaaatctttctcgccaaagcaggcgatgtccggctgcacaaggttaaacagcttgctgacgatggtggagacgccacggaaatggcccgggcggctggcgccctccagcatggtcgaaatacccggcacgtcgacgtaggtcgattcagtggtaccctggggatacacatctgcgggtgccggtgcgaagacgatatccgcatgacgttttttgagcttctcgcaatcttcctgcaaggtacgtgggtagcgcgccagatcgtcttcgcgatcgaactgcatcgggttaacgaagatactgaccaccacgatatctgcccgggctctcgcttcatcgaccagcttcatatggccgtcgtgcaggttgcccatggttggaacaagggcgatacgtttaccttcctgacgcgcccgacgaatatgctgacgcagcagcggcagggtttctatgattagcacacctggactccttaatggaaactgtgttcttcgcccggataaacgccggactcaacctcggcaatatactgccgcacagcagcacgcatgtcgcctgcttctgacaggaaatttttagcaaattttggaatgtggccgccggtgatcccgaaggcgtcgtgcatgaccagaatctggccatcggtgacgttacccgcgccgataccgatcaccggaatcgacagcgcctcagtgatacgcttagccagctcaaccggcacacactccagcaccagcagctgcgcgcccgcggcttccagcgccacggcatcatcaaacagcgtctgcgccgcatcgcctcggccctgcaccttatatccgccaaagatgttgaccgactgcggcgtcagccccaaatgaccacaaaccggcacggcgcggtcggtgagcattttcaccgtatcgaccagccaggcgccgccttcgattttgaccatattggcgccggcgcgcatcactgtcgccgcattttcgaaggcctgctccggggtggcatacgccataaacggcagatcggaaagcagcaggcaggcgggggcaccccggcgcacggcgcgggtatggtaagcaatatcctcgaccgtgaccggcagagtggaatcatgtccttgtaccgtcatccctaacgagtctccgaccagcatgacgttgatcccttcttcggcaaacagttttgcgaagctgtagtcatacgcggtgatagtggcgaagcgttttttttcctgtttgcatttctgcaataaggagatggtggttggtttcatactgtttcctgatggcccaaaagcgaatctttgcgcattctaacagtaacatttgagggaacaatgattttaggcaatcgattaaccgcaaataaggaatggttaatcgatgcggaggcgggattaccagcgggccggtttatccgcgttgagattttgcagaacggcttgcagtgaggagccgtcagggaaggtgagatcgggcgcgacttcaaacagcggccagagcataaacccgcggtttttcatgtcgtaatgcggaacggtgaggcgttcggtgttaatcacctcgtgaccgaaaagcataatatcgagatcgagcgtgcgcggtccccagcgttcggctttgcggacacgaccctgctgtagctcaatacgctgggtattatccagcagcgtttctgcgtcaagggtcgtttccagcaccacggcggcgttcagataatcaggctgatcctgcgggccaagcggcggcgtacggtaaaatgaggacagcgcgacgatgcggctttgggggatctctcccagagcctgcacggcagcgttaacctgctccagcggagaggccagattgctgccgatggcgatatacgcaagggtcatgccgtgccttcacgacgcggtgcgcgtttgcgcgggcgacggtgacgtcggcgcggtgccggttcatcatccagatccgtaagcatatctttttgctccggtggcgcagaaacctgaaactcgccccaccactgcgccaggcgctgtagttccgggttcctttcaacttcagcacgcagagagagcagatcgaacgcggcgcggaacttaggatgctccatcagcttccaggcgcgtttaccctgacggcgggacatacgcagctgaagctgccagatatcacgcaccagcgtggtaatacgtttcgggatcgccagcgtgcgacagccttcgtccagcacgtcgtttgccgccagcgcgaacgcatcataataggcgagaccgctctcctgggtaatgcgctgcgccgtttccagcagcggataccagaacatggccgcgaacaggaacgccggattcacgcgcatatcgttatgaatacgggtatcggtgttcttcagcacctgcgcaattatccgctccattgcgctgtcaccgttttcggtgaagtagcgggtaatggtcgggaacagcggctggaacaggttgtactcacgcagcaggttgtaggtttcaaacccgtagcctgcctggagcagctttaacgactcctcaaacagacgggcagggggcacgtcgttgatcagcgtcgccaggcgcgggatcggctctgcggtttccgggctgatacgcatgttcagcttggcggcgaaacgcacggcgcgaagcattcggaccggatcttcgcgatagcgtgtttccggcgtgccgatcaggcgaatcagaccgtctttcagatcctgcataccgccgacgtaatcgcgcacggtaaaatccgccacgctgtagtaaaggctgttgatggtgaaatcgcgacgctgagcatcttcttcaatagagccgaagatgttgtcacgcagcagcatgccgttttggccgcgctgggaagtcgtgcgatcgttaacgcccgcttcgtggtgaccgcggaaggtcgccacttcaataatttccggtccaaacatcacgtgcgccagacggaaacggcggccaaccagacggcagttgcggaataatttacgcacctgctcaggcgtggcgctggtcgtcacgtcgaaatcttttggttttttgcccagcagtaaatcgcgcaccccgccgccgacgagataggcctcgtagcctgctttattcagacgatagagcaccttgagggcattttcactgatatctttgcgggaaatattgtgctgctcacgcggaatgaccgacatgtgtggctgtgcaatagcgtcgttcgccatgctctcttcgcggctcagcactttacggcaaaaattagcgactcgggtaaaaatagtacacctcgtagtgtgttttgttatcaaaaaagcggctaatcatagctcagcgcaacgcatttgagaatgctggatttttggcacggccataagcgtccagtcagcaatggccgttttcagcaattcatccagactcagatcctgccattcctgcgttacattctggttgagaaatcgcagcgcgtcgatcaaaaccgggcgcggatcgccgtcaggcagcgccggggcatgattctgtttcgatagcttatttccctgttcattgactgccagcggcagatggatgtaatccggcaccgcccagccaaactgctggtaaagcgatatttgccgcacggtaggctcaaccagatccgccccgcgcacgatttccgtaacgccctggaaatggtcatcgataaccaccgccaggttataggcaaacaaaccatcacgacggtgaataataaaatcttcacgcgccaggcgttcatccgcctgaattgttcctgagagaacgtcggtaaaactgcgtcaccggagaacgctgtatcagnnnnnnnnnnnnnnnnnnnnnnnnnnnnnnnnnnnnnnnnnnnnnnnnnnnnnnnnnnnnnnnnnnnnnnnnnnnnnnnnnnnnnnnnnnnnnnnnnnnnnnnnnnnnnnnnnnnnnnnnnnnnnnnnnnnnnnnnnnnnnnnnnnnnnnnnnnnnnnnnnnnnnnnnnnnnnnnnnnnnnnnnnnnnnnnnnnnnnnnnnnnnnnnnnnnnnnnnnnnnnnnnnnnnnnnnnnnnnnnnnnnnnnnnnnnnnnnnnnnnnnnnnnnnnnnnnnnnnnnnnnnnnnnnnnnnnnnnnnnnnnnnnnnnnnnnnnnnnnnnnnnnnnnnnnnnnnnnnnnnnnnnnnnnnnnnnnnnnnnnnnnnnnnnnnnnnnnnnnnnnnnnnnnnnnnnnnnnnnnnnnnnnnnnnnnnnnnnnnnnnnnnnnnnnnnnnnnnnnnnnnnnnnnnnnnnnnnnnnnnnnnnnnnnnnnnnnnnnnnnnnnnnnnnnnnnnnnnnnnnnnnnnnnnnnnnnnnnnnnnnnnnnnnnnnnnnnnnnnnnnnnnnnnnnnnnnnnnnnnnnnnnnnnnnnnnnnnncaccggagggagatggcgcaaagcgcccgatatagtgagattcagacatatcaacggtaacaaggcgggagagactcccgccttagctgagtagtgagagggcaggcgttagccggccatctgtttttcgcggatttctgccagcgttttacagtcgatgcacagatcggctgttggacgcgcttccaggcgacgaataccgatttcaacaccgcaggattcgcagtagccaaaatcttcgtcctcgaccttcttcagcgttttttcgatctttttgatcagtttgcgctcgcggtcacggttacgcagttcgaggctgaactcttcttcctgagcggcacggtcgaccgggtccgggaagttagcagcttcatcctgcatatgtgtaacggtgcgatcgacttcatccctgagttgattacgccatgcttcaagaatacgcttgaagtgcgacagctgggcttcgttcatatactcttcgcccggcttctcttgatacggctccaccccagcgatggcgagaatactcagggacgatgttttacggttttgcccttcttgcatgttgcttctccttaacacgcactatcgatccccgtgttgggggaaaaatcaggtcgctataaatagcagatgcttttccgtatggcaattatctaaacgtaacacttgacaaccctgtgaggaaaagcgtatttgcgcacgcggccagaacacttattagtcaatcgtctaatcccttataagacaatgggaagagaggatctcagagtcatattatcggcagaaagttccgctttataagcgaaaatctctaccccctgcttttgtgcctcattcaacaattgcgcgtatttaggatcaatatgacgggccggggaaaaccgttcaatggctgaatgcagaaccgcaaacagcaacacggcgcgcttgcccgccgccgctacactcattagctctcgcagatgcttctggccacgtagcgttaccgcatccggaaagaagccgttttcctgttccgctaacgtcactgatttcacttcaatatagcactcagggcgctcttccgcctgtaacataaaatcaattctgctgccttcatcgccatatttcacttcgcttttttgcgtgccgtaacccaccagttcaggaagcattccatttgtcagggcttccttaaccagctgatttgcgcgcagggtattcacgcaaataaatgccccgctttgcgtctcggtcatttcccaggtatgaggatatttgcgtttagtattttctgatgtggaataccagaccgtgtcacccggcgtggcgcaaccggtcatggcgccggtgttagggcagtgcagcgtgagcgtttcgccctcaggggtgatcacatcagcgagaaagcgtttgtaacgctggatcagcgtggcgggctggagtgcagggctaaacttcatcaggattccttaacgtgtcgcccagcgtccagcgctgaagcggagtatagcgggtgcgtccttgtacaaaggcagattcgtacagcgcaaattcattcacctgaaaggaccagtgaaagcccggtggcgggatggcaacggcctgacccgcgtcgcgcagcagggtaatgtggggatgaaacggctgcgggctctgataacagccgctgcgcgcggcctgcgcccgcagcatgttggcgagctgtagcagtccgcgagggggctgccgcgtccccagccagaccacccgagagcgcagccattgcccggcatcgtcaagatgcagcgtaaaccccggctgcgaaatgcgtccggccattgcgcttaacgcgcgctgcttttcagcgcttacttcaccaagaaaggctaacgtcaggtgcatattggcggcgacgacggggcggcccgcttccgcggggaagtggctggcgcgccagcgaacaatctgccgttgaagcgtggtgggtaattcaatgacgaagaatagccgttttgactcagacatgcgcaagactcggtaatgatatgcgccgatgctacaatgtacgccgattaatgttaaccctctggagccgtaagtgtcctttttgcccgtcgctgtcgtccttcctgagcttctcgcagccttagaacatgcgccacaggttttgctcagcgcgcccaccggagcgggtaaatccacctggctgcccctgcaaattctgcgcgaggggagcatcagcgggaaaattatcctgctggagccacgcaggctggccgcgcgcaatgtggcgcagcgcctggcggaactgctgaatgaaaaaccgggcgagacggtagggtaccggatgcgcgccgaaacctgcgttggaccgtccacgcggctggaggtggtcaccgagggtattctcacccgtatgctgcaaaacgatccggagctgaccggcgtcgggctggtgatccttgatgaatttcacgagcgcagcctccaggccgatctggcccttgcgctgctgctcgacgttcagcaggggctgcgcgacgacctcggttgctgattatgtcggcgacgctggannnnnnnnnnnnnnnnnnnnnnnnnnnnnnnnnnnnnnnnnnnnnnnnnnnnnnnnnnnnnnnnnnnnnnnnnnnnnnnnnnnnnnnnnnnnnnnnnnnnnnnnnnnnnnnnnnnnnnnnnnnnnnnnnnnnnnnnnnnnnnnnnnnnnnnnnnnnnnnnnnnnnnnnnnnnnnnnnnnnnnnnnnnnnnnnnnnnnnnnnnnnnnnnnnnnnnnnnnnnnnnnnnnnnnnnnnnnnnnnnnnnnnnnnnnnnnnnnnnnnnnnnnnnnnnnnnnnnnnnnnnnnnnnnnnnnnnnnnnnnnnnnnnnnnnnnnnnnnnnnnnnnnnnnnnnnnnnnnnnnnnnnnnnnnnnnnnnnnnnnnnnnnnnnnnnnnnnnnnnnnnnnnnnnnnnnnnnnnnnnnnnnnnnnnnnnnnnnnnnnnnnnnnnnnnnnnnnnnnnnnnnnnnnnnnnnnnnnnnnnnnnnnnnnnnnnnnnnnnnnnnnnnnnnnnnnnnnnnnnnnnnnnnnnnnnnnnnnnnnnnnnnnnnnnnnnnnnnnnnnnnnnnnnnnnnnnnnnnnnnnnnnnnnnnnnnnnnnnnnnnnnnnnnnnnnnnnnnnnnnnnnnnnnnnnnnnnnnnnnnnnnnnnnnnnnnnnnnnnnnnnnnnnnnnnnnnnnnnnnnnnnnnnnnnnnnnnnnnnnnnnnnnnnnnnnnnnnnnnnnnnnnnnnnnnnnnnnnnnnnnnnnnnnnnnnnnnnnnnnnnnnnnnnnnnnnnnnnnnnnnnnnnnnnnnnnnnnnnnnnnnnnnnnnnnnnnnnnnnnnnnnnnnnnnnnnnnnnnnnnnnnnnnnnnnnnnnnnnnnnnnnnnnnnnnnnnnnnnnnnnnnnnnnnnnnnnnnnnnnnnnnnnnnnnnnnnnnnnnnnnnnnnnnnnnnnnnnnnnnnnnnnnnnnnnnnnnnnnnnnnnnnnnnnnnnnnnnnnnnnnnnnnnnnnnnnnnnnnnnnnnnnnnnnnnnnnnnnnnnnnnnnnnnnnnnnnnnnnnnnnnnnnnnnnnnnnnnnnnnnnnnnnnnnnnnnnnnnnnnnnnnnnnnnnnnnnnnnnnnnnnnnnnnnnnnnnnnnnnnnnnnnnnnnnnnnnnnnnnnnnnnnnnnnnnnnnnnnnnnnnnnnnnnnnnnnnnnnnnnnnnnnnnnnnnnnnnnnnnnnnnnnnnnnnnnnnnnnnnnnnnnnnnnnnnnnnnnnnnnnnnnnnnnnnnnnnnnnnnnnnnnnnnnnnnnnnnnnnnnnnnnnnnnnnnnnnnnnnnnnnnnnnnnnnnnnnnnnnnnnnnnnnnnnnnnnnnnnnnnnnnnnnnnnnnnnnnnnnnnnnnnnnnnnnnnnnnnnnnnnnnnnnnnnnnnnnnnnnnnnnnnnnnnnnnnnnnnnnnnnnnnnnnnnnnnnnnnnnnnnnnnnnnnnnnnnnnnnnnnnnnnnnnnnnnnnnnnnnnnnnnnnnnnnnnnnnnnnnnnnnnnnnnnnnnnnnnnnnnnnnnnnnnnnnnnnnnnnnnnnnnnnnnnnnnnnnnnnnnnnnnnnnnnnnnnnnnnnnnnnnnnnnnnnnnnnnnnnnnnnnnnnnnnnnnnnnnnnnnnnnnnnnnnnnnnnnnnnnnnnnnnnnnnnnnnnnnnnnnnnnnnnnnnnnnnnnnnnnnnnnnnnnnnnnnnnnnnnnnnnnnnnnnnnnnnnnnnnnnnnnnnnnnnnnnnnnnnnnnnnnnnnnnnnnnnnnnnnnnnnnnnnnnnnnnnnnnnnnnnnnnnnnnnnnnnnnnnnnnnnnnnnnnnnnnnnnnnnnnnnnnnnnnnnnnnnnnnnnnnnnnnnnnnnnnnnnnnnnnnnnnnnnnnnnnnnnnnnnnnnnnnnnnnnnnnnnnnnnnnnnnnnnnnnnnnnnnnnnnnnnnnnnnnnnnnnnnnnnnnnnnnnnnnnnnnnnnnnnnnnnnnnnnnnnnnnnnnnnnnnnnnnnnnnnnnnnnnnnnnnnnnnnnnnnnnnggggaaagggagaaacaaactttgagagatttcttctttcactgacctgtgcaagataagaaaatctggcctttgcgcctgaatgttgcggagaaaaagcatggcggggaatgaccgcgagccaataggacgtaagggaaagccgacgcgtccggcgaaagaaaaggtaagccgtcgtcgcctcagagatgaggagtatgacgatgactatgaagacgattatgaggatgaagaaccgatgccacgtaaagggaaaggcaaagggcgtaagcctcgtggtaagcgcggctggttctggttgctgctgaagctgttcattgtttttgttgtcctgatcgcgatttacggcgtttatctggatcagaagatccgcagccgtatcgacgggaaagtctggcaattgcctgcggcagtgtacggccgcatggtgaaccttgagccggacatgtccatcagcaagaacgagatggtgaagctgctgcaagccacgcagtatcgtcaggtcacgaaaatgacccgtccgggtgaatttaccgtccaggcgaaaagcattgagatgatccgccgtccgttcgacttcccggacagtaaagaagggcaggtgcgcgcgcgtctgacctttgacggcgatcgtctggaaaccattgagaacatggataacgatcgccagttcggtttcttccgtctcgatccgcgcctcatcaccatgctgtcgtccgcaaacggcgaacagcgcctgttcgtggcgcgtaacggcttcccggatctgctggtagataccctgctggcaaccgaagatcgccacttctacgagcacgacggtattagcctttactccattggtcgtgcggtactggcgaacctgaccgccggtcgtacggtgcagggggcgagtaccctgacccagcagctggtgaaaaacctgttcctctccagcgaacgctcttactggcgtaaagccaatgaagcgtacatggccgtgctgatggatgcgcgttacagcaaggatcgtattcttgagctgtacatgaacgaggtgtacctcggtcagagcggtgacaacgagatccgcggcttcccgctggcgagcctgtactactttggtcgtcccgtagaagagctgagccttgaccagcaggcgctgctggtgggcatggtgaaaggcgcgtcgatctacaacccgtggcgtaacccgaaactggcgctggagcgtcgtaacctggtgctgcgtctgctgcaacaacagcaggtgattgaccaggagctgtacgacatgctgagcgcgcgtccgctgggcgttcagccgcgtggtggggtgatctctccgcagcctgcctttatgcagatggtgcgtcaggagttgcagtctaagctcggggataaagtgaaagatctctccggcgtgaagatctttaccacctttgactccgtggcacaggacgccgcagaaaaagcggcggtagaaggtattccggcgctgaaaaagcagcgtaagctgagcgatctggaaactgcgatggtagtggttgaccgtaacaccggcgaagttcgtgccatggtgggtggcgctgagccgcagtttgcgggctataaccgtgccatgcaggcgcgtcgttcaattggttcactggcaaaaccggcgacctatctgaccgcgctgagccagccgaatctttatcgcctgaatacctggattgccgatgcgccaatttccctgcgccagcctaacggccaggtttggtcaccgcagaacgatgacagacagttcagcggccaggtcatgctggtggatgcgttaacccgctcgatgaacgtgccaacggttaacctcggaatggcgctgggcctgccggccattaccgacacctggcagaagctgggggtaccgaaagatcagctgcacccggtgccagcgatgattctgggggcgcttaacctgacgccaatcgaagtggcgcaggcgttccagaccatcgccagcggcggtaaccgtgctccgctttccgctctgcgttcggtgattgccgaagatggctccgtgctgtatcagagcttcccgcaggcagaacgtgcagttccggcgcaggcggcctatatgacgctgtggaccatgcagcaggttgtccagcgcggtacaggccgtcagctgggagcgaagtatccgggcctgcatctggcgggtaaaaccgggaccaccaacaacaacgtcgatacctggttcgccggtattgatggtcgtgaagtggtcatcacctgggtggggcgcgataacaaccagccgaccaaactgtatggcgcgagcggtgcgatgtcgatttaccagcgctacctggccaaccagtctccggtgccgctgaacctggttgccccggaagatatcgttgatatgggggtggacgcatcgggcaactttatctgcggtggcgggatgcgtacgctgccggtctggacgactaacccggatgcgctgtgtcagcaaagtcagccagaagaaccgacaggtaacccgttcgatcaatcttctcaacctcagcagccgcagcagcaacagccgcagcagcagaatgagaagaaagacagcgacggtgtcgccggctggatcaaggacatgtttggcggaaactaattagtttcctgaataaaaggccgcttaatgattaagcggcctttttttatgtttacattcatttatatttaaaattattaaatttaaaatgtagaattattaatttttgctttttttcatactaaaacagaaagttgtgtccgattattcgggcattatcattttgcgatctagacgtgatgaagaataatctgattaaatcctccccagaaatttactgacctcacaggatattccttagaggacttcccaacatttttgtatatatcaagaatggatatcttcatcatcacatataaggatattgttatgagtaaatatgttgtttcaacggtgttggccagcacgcttatggctgcactctctctgccggtatttgcagcgaatgattctggtacggtaaatttcgccggaaaaattgtggcggatacctgtgaaattgatgttgatggctcggggtccaatacttccaccgtcacatttgcagatacttatccttctgattttggtactgacggtcaggtcgggacgtcgaaggcctttaagattgaagtgaaaaaatgtgatccgctggttgccaaactgaacctcaagttcagcggcaccacaacggatgcggaatacaagcgcctgaagaacgatctttccggcgctggcaatgcgaccaacgttggcatcattgtcagtaatgaaaatgggactaagggggacgtggttttcaacggatcagaaccggaagccggtaccgatgttgcgaacgatgccactggcgccacagcatctgtctttaattacaccgcgaaagttattcaggttggtgataacaaaccaacagcaggtcactactcctcatctgcaacgttcgaggttgtttatcgctaaatctattttggcagcctgaaagggctgccttctggaacgtagtatgaattatttattaaaattgttaggtggatgtttgattatctcttgctgttcagtacaggcaagtgtggttctcggtggcacgcgaattatttatccatcgaataaatccgaagtacaaatagcactcaaaaataaagaccctcatactcgatatctggtgcaaagctgggtgagttaccccaacgatgcaaaagcacctttcatcattacgccgcctgtctataaattacaggaaaatcgtcagacccttttgcacatcatttttaccggcgataaaaaaaatctgcccgcagatcgcgaatctttatttctggcgaatgtgaaatccgtctcggcgttatcacctgacttaaaagacaagaatacgctgcaattcgcgatgaaaacgcgtctgaagctgttctggcgtcctgctgatttgaaagaaaccgatgcgctacaagcctatgaaaaaatcaccttccgccgccaggggaacaagctcattgcgaaaaacccaacgccgttttacgtctcctttggcgagctggccgtgggcgggaaaagtgtccctgtgactgacacaaaaaccacgccgggggcaatttcaatgatggtcgcacctttcagcgagcaatatttttctgtgcctcaatctgcaaacgggcccgtgacgtggactgctattagcgatttcggcgcgcaaacctcccagcgcaagcaggctctttaaacacacaatgctggtaccctatgtcgtcatctccactctacaaacaggttctgaagggaatcgcgttagcgctgctcgcgatgatccagcctgtgagtgcagatgacgaatttaacctgcggatcctcgagatggacactccgctggaaaacacctcaacgctaaaaaatttcatcaatgataatggcttactgcccggaaactttctgacgaccattatgtgggatcgggatgttctggataaacgcacggtgagttggatcttgtctgacgataagcagcgcctgttaccggagctgaccaaagcggatctgcgtgcattaggggtaaaagtcgacacgatcccggatatgaaagatctggatgatgcggcgataatcgatgacatctcccattttattgataatgcccgctacgattacgaccaggataatcagaccctcaagctggtgatcccgcaaaaataccgcgatcaggctgcggccggggctatcgagcctaaattctgggatgacggtgctcccgccgcctggacaagctaccagtttagcggctctcagcagcactaccgttctggtgaaacgtcatctgcatggcttggtctggagtcggggatcaacctcggggcgtggcggttgcgtaacaacagcacctggagtgacaacgccggttgggatgcaatcgccagtacgctgcaacgtgatatcaaaaccctgcaaagccagcttgagataggccagacgtacactaacggcgagcttttcgacagcgtccaaatgaccggcgtgaagctggaaacggatacttccatgctgcccaccagccagcaggggtttgcccccgtggtgcgtggtatcgcaaatagcgatgcaaaagtcaccatcaggcaaaacggctacaccatttatcaaagcaacgtctctccggggccatttgagatccgcgatttaagccaggtcacatccggcgcggatctggaggtgacggtggaagaggccgacggcagcgaacacagcttcatccaggccagcgcatcggtaccggtgctacagcgggaaggggcatttaaatattcgctggcggcagggcgttatcgcggtaatgaaggtgaggacgagcccccttttctgcaagggacggtcatttacggcctgccttatggcgtaacaacatacgccggcgcgctcgttgcatcgtcgtatcaggctatgctggcgggaacaggggccgatcttggccgtttcggatcggcatccgtggatgtgaccgccgcccgtacggcttttgatgatggacgagatgatgcccgcgggatgtcatggcgtgcgcagtattccagggatattccggatacagacaccaccgtgacgcttgccagctaccgttattccacctcagggttttatacctttcaggaagctgtcgaccagcgtgacagcgagattgacgatgggatttatacctatcggcgaaccaataatcggcgcagccgcatgcaggttaatctttcccaacgcgtttcggactggggatcggcttaccttaatggttatcagcaggattactggaacatggcgggacacgagcgcagcgtcagtgcggggctaagctccggctggcgcggtataacctggtcggtaagctacagcctgacgcgtacgccggacgccaataccgatcggcaaatggcgttgatggtcaacgtacctctttcacgctggctagcgaacgcatggtcaacttacagcgccaacactgccagcggtggattcgtttcgcatcaggtagggatcggcggcacggcacttgagaacaataacctcagctataacctccagcagacctannnnnnnnnnnnnnnnnnnnnnnnnnnnnnnnnnnnnnnnnnnnnnnnnnnnnnnnnnnnnnnnnnnnnnnnnnnnnnnnnnnnnnnnnnnnnnnnnnnnnnnnnnnnnnnnnnnnnnnnnnnnnnnnnnnnnnnnnnnnnnnnnnnnnnnnnnnnnnnnnnnnnnnnnnnnnnnnnnnnnnnnnnnnnnnnnnnnnnnnnnnnnnnnnnnnnnnnnnnnnnnnnnnnnnnnnnnnnnnnnnnnnnnnnnnnnnnnnnnnnnnnnnnnnnnnnnnnnnnnnnnnnnnnnnnnnnnnnnnnnnnnnnnnnnnnnnnnnnnnnnnnnnnnnnnnnnnnnnnnnnnnnnnnnnnnnnnnnnnnnnnnnnnnnnnnnnnnnnnnnnnnnnnnnnnnnnnnnnnnnnnnnnnnnnnnnnnnnnnnnnnnnnnnnnnnnnnnnnnnnnnnnnnnntatgccagtcacgatactggctatggtggcagtgtatccgggcgctaccggggatctgccggtgatgtcgggctggggtataactacgggggcgataaccgacagtggaactacagcgcgcagggttcaattgttgcgcatgaacatggagtaaccctggggcaatccgtccgcgacgcctttgccattgtccatatcaaagatggcgataacgtcaaagtacagaacgggcgagggatctacaccgatcgctttggtaacgcgattgtcccttccctgacggcctaccggaaaaacggtattacggtcaacacccaggatcgtgaagatattgaaattgccgccgctacccaggatgttgtcccaacaaaaggcgcggccatctcagcgaattttgatgcacgagtggggaagcgtgcgcttatcacgctgcttttccacggcaagccggtacctttcggcgccattgtcacgcaggaaagtgcaacggctatcgtcggtgatgaaggagaagtctggcttaccggtctgcatgaagcggtttccctgaatgtgcagtggggtgacgggcgcgatcaacggtgtgcgtgggcgggggatctccctcccgggcgctcagcaactattttgaaaatgacggtaaattgccaatgaggcgtagcaaagaactattcatcagcgcaatggctggcctaatcatgctgttttcagctccggcattcgcaacttgtacatttacgggaggcggaagtagcgggggaattgttaccttcaacattcccgctgtcatccagcttgagccagacgttcaggtcggtaccattatttatgacgccagcgtggaatcaggtgaaattgcgcaaagatgtgatggtgattccgttcgggtacgtagaggctatctctcattgagtgatgctgatgcacgtgaagatgttttacccggagtgtataaaaccaacgtggccgggattggcattcgcgttgcagcgtctacaacccagttccccagctataccgaagaagacattatcaggccggaaacttatcttggcacgatcagaagcttttcaacgaattacaattttcgggctaccgctcagttgatcgttattggtgaagtcgaagagggcgatcttaatacgtccctgttaacctcacatgaaacttacgataacgacgtgataggcgaaattcgcttttcaccaaccagtgtgcacatcacgacaaacacctgtaacctggcggataaaaacatctacgtgccgctagaaacggtcaatgcgcacgattttaacggtcagtattctgacatcctgaccgacagtcgtttcaggattgatattacggactgcgccgccgggacaaaaattgattatcagttcaccagtgcagggtcgactggcgtaacggatggcaatatcctcaacattgctaccggagacaacgctgcaagcggcgtaggcattcaaatcctcgacaagaacgatgcggtgttacagttcgaccagagctacacggcaataacccgtagccaggacaacgtcccggttgagatcccactcaaagcccgttacatcaaaacgggagaggttaaagccgggaaagtcgacgccgtcgcgactttcgaactcttctatcgttaagccctccggcccgtttcggcgggctttagcgatcatttcgctaacttcattaaccctctattttcatctggttaattcttaaacccttaaatcttgtagggccgcatactgcttgctatgcagccaacgtttcgcatattattctgcggtcataataataattctcgtttacgttatcattcacttttccatcagagatccatcatggcgctttccaatactgctcagccaattaacacgtcgctgcgtaaaatcgcggtcgtcgtagccacagcggttgccggcatgtctgcttatgctcatgccgccgaaaccccgaaaaaagaagaaaccattactgttactgccgcaccggctgcgcaggagagtgcctgggggcctgcaccgacgattgcagcaaagcgcactgcaacggcgacgaaaaccgatacaccgatcgagaaaaccccgcagtccatttccgtggtcacacgtgaagagatggacatgaaacagccggggacggttaaacaggcgctggcctacacgccgagcgttttcgcaacgcgcggcgcctccacgacctatgacgtggtttctattcgtggttttacgacctccagtacagtgaacaccaaccagtatctggacggtatgaagctgcaaggggataactactctgaagcgtcgatggacccatacttcctggagcgcgtagagctgctgcgaggcccgacgtccgtactgtatggaaaaagccaccctggcggcgtagtgagtatggtcagcaagcgtccaaccacggaaccgttaaaagaaattcagttcaaaatggggacggataacctgtggcagactgggtttgacttcagcgacgcgattgatgataacggcgtgtggtcctaccgtctgaccggcctgggacgcagtgaaaatgcgcagcaggagatggtgaagtctactcgttacgcgattgcgccgtctttcagctggcgtcctgatgataaaaccgatttcactttcctgagcaacttccagagcgatccggatgcgggttactacggctggctgccgcgtgaaggtaccgttgtgccttactatgatgctaacggaaaggcgcacaaactgccgaccgatttcaacgaaggcgatgaagacaataagatctcccgtcgtcagaaaatggtgggttacagcttcgcgcatgaattcaacgacaccttcaccgtgcgtcagaatctgcgttataccaaaatcaatacgctttaccgttcagtttacggtaacggctatatcgctccggcccagatcagccgtgcgtacgtgcgctcagatgaagacctcaactcgttcacggttgatacacagctccagtcgaaattcgcgaccggtgccgttgaccatacgctgctgacgggggtggattaccttcgtatgcgcaatgatattgatgctgactacggtaccgccgatccgatcagcatgaacaatccgcagcacggcaatgcgaacgtcaatgtgaacttcccgtatgccatgctcaatcgccaggagcagaccgggctctatgcgcaggatcaggcggaatgggataagtgggtactcaccatgggtggccgctatgactttgcaaaaacgtctgcctttaaccgtaataacgggaccaccgcggaaattaacgatcaggcatttacctggcgcggggggattaactacctgttcgacaacgggattaccccatacttcagctacagtgaatcctttgaaccgctctctggcaccacccagggcggcaaaccgttcgacccggcgcgcggcaagcagtatgaagcgggcgtgaagtatgttcctaaagatctgcctgttgtggtgacggccgcggtatatcagctgaccaagaacaacaacctgaccgccgatccggcgaacccgaccagcggctttagcgtgcagggcggtgaaattcgctcccgtggctttgagctggaagcgaaagcggcggtgtcggctaacgtgaacgtaacggcggcctacagctacacagatgcggaatatacccacgatacctggtatgaaggtcgtcgtccggcagaagtaccgcgcaacatggcatccctgtgggcggattacaccttccacgagacggcgctgagtggcctgaccgtcggtgcgggcgcgcgttacatcggtaacacggtgacgtactactcctcagcgtcgcctaaagcctatgagtcctttaacgtcgcgggttatgccctggcggatgcgaccgtgaaatacgatctggcgcgctttggtctgccgggatcttccgtcggcgtcaacgtgaacaacatctttgaccgtgaatacgtctccagctgctacagcgagtatgcatgctactggggagcaggacgccaggttgttgccaccgcgaccttccgcttctaacctctttatgggcacggttcgccgtgccctttttatttaagttggctgacatgcaggataataaaacgcaatccgactccaccttcacgcttaacaatctctcctttcgcgtacccgggcgcaccttgctgcatccgctctctttgacgtttcccgcaggtaaagtgaccggtttaatcgggcacaatggttccggtaaatcgacgctgctgaagatgctgggtcgtcatcagccgccgtccgagggcgacatattgctggatgaccagccgctggcgagctggagcagtaaggcctttgcccgcaaggtggcctatctgccgcagcagttgccgcaggcggaggggatgacggtgcgcgagctggtggcgattggacgttatccgtggcacggtgcgctcgggcgttttggcctcgctgacagagagaaagtggaagaggcgatcgcgctggttgggttaaaaccgctggcgcatcgtctggtggatagcctgtccggtggcgagcgtcagcgcgcatggatcgcgatgctggtggcgcaggacagccgctgcctgctgctcgacgaacccacgtcggcgctggacattgcgcatcaggttgacgtcctggcgctggtgcatcgcttaagtcagcagcgcggcctgacggtgattgccgttctgcatgatatcaacatggcggcacgctattgcgactacctggtagcgctgcgcggcggtgaaatgatcgctcagggtacgcctgccgaactgatgcacagcgaaacgctggaacatatctacggtattcctatgggcatcctgtctcacccagccggtgctgcacccgtgagctttgtctactgatgctggattcaacattcattagccgccgtcgcctgctgacggccatggcgctctcaccgctgctgttaaagatgggcccggcccgcgctgccgctatcgatccgcaccgcatcgtggcgctggagtggttgcccgtcgaactgatgatggcgcttggcgtgacgccttacggcgtggccgatattcccaactacaccctgtgggtgaatgagccaaaactgccggactccgtcatcgacattggcctgcgtacggagccgaatcttgagcttctcacccagatgaaaccgtcttatttattctggtctgcggggtatggcccgtcggaagagaccatggcgaagattgcgccagggcggggcttttcctttagcgacggcaaaaagccgctgaccatggcaaaaaattccatccacgagatggcgcagtttctcaaccgtgaggctcaggcgaaaaaacatctcgatgaatttgatgcgctgattgattccctcaagccgcgctttgcccaccgtggcgatcggcctttgctgatggtaaccctgctggatgcccgccatatgctggtctttggaaataactgtctgttccaggaagtgctcgacagctttggcattcgcaatgcctgggaaggcgagatgacattctggggcagtaccgccgtgggtattgaccgtctggcggcgtttcgtgatgtggacgtgctgtgcttcgatcacgggaacgagcgcgagatgcaaaccctgatggcgaccccgctctggcaggcaatgccgttcgtccgcgagcagcgcttcctgcgcgcgccagcggtatggttctacggcgcgacgctgtcggcaatgcattttgcccgcgtgctggacaatgcactgggaggcaaggcatgagcacgcgtatggctcgtttcccaatgttgctgttagcgctcatttttctggctgccctgatgttaaccggctttaacctgagcacggcgttaccgcgcgatcaatgggcagccgcgtttgccgcaccggatatcgataatattcagcaaatgctgttccactacagcctgctgccgcgtctggctatctccctgctggtcggggcgggactgggactggtgggcgtactgtttcagcaggtgctgcgtaacccgctggcagagccgaccacgctgggcgtggcgacgggggctcagctggggatcaccatcaccactctctggaccctgccgggagcgttaacctcgcagtttgccgcgctggcaggcgcatgtgtggtcggtgcgctggtctttggcgtggcctggggaaaacgtctctcgccggtcacgctgatcctcgcggggctggtcgtcagcctctactgtggggcgatcaaccagctgctggtgctgtttcaccacgaccagctgcaaagcatgtttatgtggagtaccggcacgctcacccagaccgactggagtatcgtccagcgcctgtggccgcagctgttcggcggcgtggtgctgacgctgctgctgctgcgtccgctgacgttgatgggcctcgatgacggcgtggcgcgcaatctggggctggcgctgtcgctggcgcgtctggcggccctgaccctggcgattgtgctgagcgcgttactggttaacgccgtcggcatcatcggttttatcggtctgtttgcgccattgctggcaaaaatgctcggcgcgcgccgtctgctggcgcgtctgatgctggctccgctgattggtgcgctgatcctctggctttccgatcaactcattctctggctggcgcgcgtctggatggaagtttccacgggctcggtgacggccctgatcggcgcgcctctgctgctgtggctgttgccgcgcctgcgcagcattagcgccccggcaatggatgccggcgataaagtacatgccgaacgtcagtcggtggtgtggttcagccttgccggactggcggtgctggttatcgcctcgtttgccgcactctcgctgggacgcgacgccacgggctggcactgggcgacgggggatttgctgcatgaactcatgcagtggcgctggccgcggatcttctccgcgctgattgcgggcgtcatgctggcggtggcgggctgtattatccagcgtctcaccggcaacccgatggcaagcccggaagtattagggatcagctccggagccgcgtttggcgtagtgttaatgttgttcctcgtgccgggaaatgcgttcggctggctgatgcctgccgggagtatcggcgcggcagtcacgctgatgattatcctgatcgcctccgggcgaggggggttctcacctcaccgcatgctgctggccgggatggcgctcagcaccgcgtttactatgctgctgatgatgttgcaggcgagcggcgatccgcgcatggcgcagatcctgacctggatttccggttcaacgtacaacgccaccggcagtcaggtggtgcataccgggattgtgatgatcgtgctgctggcgattgtgccgctgtgccgtcgctggatgaccattctgccgctgggtggggataccgcccgcgcggtcgggctggcgctgacgccaacgcgtatcgccctgttgctgctggccgcgtgcctgacggcgacggccaccatgactatcggcccgctcagttttgtcggattaatggcgccgcatatcgcccgtatgatgggcttccgccggactttgccgcatatcgtgatctctgcgctgacgggcggggtaatcctggtctttgctgactggtgcggaaggatggtgctgtttccgtatcagatcccggcgggcctgctgtcgacctttatcggcgcgccgtactttatatatctgttgagaaagcagagtcggtaataaaagtaaacggcaatccttagattgccgttttcgtgtttgctccctctcccaagggaagatggagaacatcgtaggccgggtaagcgttagcgccacccggcaatgcccttagagcttcgcaaacaccttacgcgctgcgtcgatggtgttattgatatcttcttcgctgtgcgccacggacataaagcccgcttcaaacgctgacggcgcaagatacacgccttcttccagcatcagatggaagaagcgtttgaagcgttccacgtcgcatttcaccacgtcctgatagcaggtcacggttttcgcatcggtgaagaaaatcccgaacatcccgccgacgtggtttaccaccagcggaatacccgcgtcttctgcggcttccagcaggccgtttgccagctgcgtcgtccggtccgtcagggtttcgtggatacccggctgcgccacttcggtcagacaggcaaagcccgccgccatcgcaatcgggttaccggagagcgtacccgcctggtaaaccggaccggttggcgccagcgcgtccatcacgtccttacggccgccaaacgcgccgacaggcatgccgccgccaatgattttgccgaggcaggtcagatccggctcaacgccgtagtatgactgcgcccccgccagcgcgacgcggaaaccggtcatcacttcgtcgatgatcagcagcgcgccgaactcatcgcacagcgcgcgcaggcccggcaggaaatccggctgcggtggaatacagttcatgttgcccgccaccggttcaacgatgatgcaggcgatctcctgcggatactgctcgaacgcggcgcgaacggtgttcagatcgttataggtgcaggtcaacgtgtgtttcgcgaaatcagccggcacccccggagagtttggctggccgagggtcagcgcgccggaaccggcttttaccagcaggcagtcggcgtggccgtgataacaaccttcgaacttgatgatcttgtcacgaccggtaaaaccgcgcgccagacggatagcgctcatggtcgcttcggtaccggagttcaccatacgcaccatgtccatcgttggcaccagctcggtgaccagctccgccattttgacttccatctcggttggcgcgccgaagctcaggccgcgctgagcggcttcaatcaccgcgttgcggatcgccgggtggttgtgccccagtaccatcgggccccaggagccgacgtaatcgacataggctttaccatccacatcatacagatatgccccatccgcacgttcgataaacagcggggtgccacccacgccggtaaaggcgcgcacgggtgagtttacgccgcctgggataagctcgcgggctgcgctgtagaggttttcagacttgctcatggcgtcgttcctggttcgtagaaataagttaaggcaactattctaagtgattcggaagaggttataaaatttttgcccctcagaaggcttaacaattgttaagtatttttcaggggacgaggggattgtctctggtagaatccctgcggccttttgtatgacgaaacagaacaggtaatgaacgagaacacaccttcttttgaacaacaacagtttacgcgcgcgaagcaccgggtcagtatccggcggctgctcaaccgtgacaaaaccccgttagccattctgctggcagccgccgtggtcggtacgctggccgggctggtgggggtcgcattcgagaaagcggtcaacgcggtgctcaactggcgcataggtaccgtcgccagctttgccgatcgggaatggctggtctgggtgtgggcctttggcctttcggcgctgtttgccatggtggggtattttctggtgcgtaaattcgcacctgaagcaggtggctcggggatccctgaaattgagggggcgctggaggagctacgcccggttcgctggtggcgggtgcttcctgtgaaatttatcggcgggatgggaaccctcggggcgggcatggtgctcggtcgggaagggccaacggtacagctgggcggtaacgtcgggcgcatggtcggcgatctgttccgtatgcgcagcgccgaagcacggcatacactgctggcgacgggggccgcagcggggctgtctgcggcgtttaacgcgccgctggcgggtatcctgtttatcattgaagagatgcgcgcccagttccgctacaacctgatctccattaaagcggtgtttaccggcgtgattatgtcgagcattgtctttcgcgtctttaacggcgaaggagcggtgattgaagttggcaagctgaccaatgcgccggtcaatactttatggctgtatctggttcttgggatgatttttggcgtcgtcggcccgctttttaacaccctgattttacgggcgcaggatatgtttcagcgcatccatggcggaaataccacgaaatgggtgctggtgggaggcctgcttggcggcgtgtgcgggatcctcggtttcatcgaaccgaatgcggcgggcggcggtttcggcctgattctcattgccgcggcggggaatttcagcgtaggcctgctgctgtttatgtttatttcacgcgtcatcaccacggtattgtgcttctcctctggcgccccgggcggcatttttgctccgatgctggcactggggacgctgctgggtacggcgttcgggatggcggcggcggcaggtttcccggcctaccatctggatgcggggacgtttgcggttgcgggaatgggggcgctgctggcggcctccctgcgcgcgccgctgaccgggatcgtactggtgctggaaatgaccgacaattaccagctcattttgccaatgatcattacctgtctcggcgcgacactattagcccaattcctgggtggaaaaccgctatactccaccattcttgcccgtaccctggcgaaacaggaagctgaacaggccctgaagcagaatacttgaatgaattaccagggtattagataatgacaaaaagaattgggtgatttttgcccaatagcagtcgcagtattcatgggagcataagatgagtgatgacgtagcgttgccgctggaatttaccgaagcagcagcgaaaaaagtgaaaaccctgattgccgacgaggacaatccggatctgaaactgcgtgtttatattaccggcggcggctgtagtggcttccagtatggttttacctttgacgatcaggttaacgatggtgatatgactatcgagaaacagggcgtcgcgctggtggttgacccgatgagcctgcaatatctggtgggcggttcagtggactacactgaaggtctggaaggttcgcgctttgtggtgactaacccgaatgcgaccagcacctgcgggtgtggttcttcgttcagtatttaagcctgaacgcagattgtaggcccggtaagcgaagcgctaccgggcttataaacgacgcctatcttgaattttcatccagcgcaaacgtcggcagcttcaggtgccagcgtatcgccgctaaacggatcaccagcgtgaccaccatccccagcatcgccgcattctccagcgggacaacaaaggtgtaatacgccgtggcgtgaacaatccccccgatgatacaggccgtcgcgtagatttccgttcgcaggatcatcgggacttctcgcgccagtatgtcgcgaataatccctccgcccacgccggttaacacgcccatgcagatcgccaccagcgggccagtcccggcaataaaggctttattcacgcctatccccacaaagaccgccagaccgacggcatccagcaccggtaatatccattttggcagtctgcgaggctgacgaaccagcacgatggttaacaggcaggtgaccatcgccaccaccagatccgtgggatcttttnnnnnnnnnnnnnnnnnnnnnnnnnnnnnnnnnnnnnnnnnnnnnnnnnnnnnnnnnnnnnnnnnnnnnnnnnnnnnnnnnnnnnnnnnnnnnnnnnnnnnnnnnnnnnnnnnnnnnnnnnnnnnnnnnnnnnnnnnnnnnnnnnnnnnnnnnnnnnnnnnnnnnnnnnnnnnnnnnnnnnnnnnnnnnnnnnnnnnnnnnnnnnnnnnnnnnnnnnnnnnnnnnnnnnnnnnnnnnnnnnnnnnnnnnnnnnnnnnnnnnnnnnnnnnnnnnnaaaataccgggccatttgccagcgccatatcgcggatcgttccgcctcccaccgccgtaacaacgccgagtaccagtacgccaaaagggtccatgcgcagttttccggcaagcaaaacgccggagatagcaaaaacggctgtgccaagaatatccagccaatacacgagcatcgttaaatcctcgaagggggtatttatctgtttgagtgactctctgccagttcggcgcagagttgttttgcggcgaggataatacgcgggctggcgcgttcaaaccagtcgctgttgagtgcgatgaccggaattttaagctgccgatgccagaattgttctattttaggaatctcgctcgcatttccgaccaccacaatggcctgcggttgtcgcgcaagaacctgctcacgactgacctggggccagggaacccggctttcggcaaagatattttcacctccacaggtttcaagcacctggttctggatcgagcctttcccggtagtgaacagcggctggctgccaaattgcagaaaaacgcgttgtttcggttgcgtgccgtatcgggcttttagcgcggcatagtcgttgagcatctgctgtgcagcctgcccggcgcgttggggggtagggctgaaaggcgcgaggtcacggagggtttgcgccacctgttcgatgctcaccgcgtccacccatttcaccgttattcccagcgaagagagctggttcacctgccgttcggcattaccgccgcgccaggcgaggaccagatcgggctttagcgccacgatgcgttccaggttcattccctgccaggtggcaacctgttcgatatgggcggcctgcggtggataatcggaaaagctgctcaccgcaacgggcgtgatcccggcggcaaacgccagttccgtattggcaggagagagagtgatcacccgcggcgcggcgatgagccaggccggagcgagcagaagcagggcgaccagcgccctgaatgacaccttacccacgcgccagtttctgcaccagggtttccaccatcacggtggactgtttcgccgcaacggccaggaattcgtcgaagctgatgtgggactgctggtccgccacgtcagagatagcgcgaacgaccacgaacggcacgctgaagttatggcatacgtgcgcgatggccgtggcttccatctcaacggccacagcctgcgggaagttatgacggattttcgccagaccgacagagccgttgataaaggcatcgccgctgacgatcaggccacgcaccgcattgaggttcagctcgttaatgcagctttcagcggcggcaatcagcttatcatccgctttaaacccggccgggcagcccggaagctgaccatattcgtagccgaatgcggtgacatctgcatcgtggtaacgcgcttcgtcggaaaccacgatatcgcccactttcagcgtcggcgccagaccgcccgcagaacccgtattaatgataacgtcaggcttgcagcgctcaagcagcagggtcgcgcccagtgccgctgcaactttaccgatgcctgatttcagcagagccacgtcaacaccgttcagctggccggtgtagatctcacagccaccgagggagagggtctgacggttctcaattttgtcacgcagcagcgtaacttcttcttccattgcaccaataatgccgattttcatagatttactcgcgatgtgccttgttaagatgcatagtctatcatgcggttaaggggaaacgcattctcacgcgggggagcacatggcaccaatcgattttcgcaccaaaattaactggcaccgacgtttccgttcgccacagggcgataagagcgagcatgagatcctgcgcattttcgaaagcgatcgcggacgcatcatcaactcgcccgccatccgccggttacagcaaaaaacccaggtgttccccttggagcgtaacgccgcggtgcgtacgcggttaacgcactccatggaagtgcagcaggtggggcgctacattgcgaaagagatcctcagccgccttaaagagcaacgtctgctggaaacctacggactggatgaactgaccgggccgttcgaaagcatcgttgagatggcctgcctgatgcacgatatcggcaatcctccctttggtcatttcggcgaggccgccatcaatgactggtttaaacagcggctttttccctctgacgccataagccagccgctcagcgatgaccgctgtgtggtacgcgatttatgcctgcgtgaaggcgaagatagcctgaacgatctgcgccgtaaggtgcgccaggatctgtgtcatttcgaaggtaacgcgcaggggatccgtctggtgcactccctgatgcggatgaatctgacctgggcccaggtgggctgtattcttaaatacacgcgtcccgcatggtggaccggagaaacgcccgccacgcatagctacctgatgaaaaaaccgggctattacttatcggaagaagcatacatcgcgcggttgcgtaaagaactgtctcttacccctaatggccgttttccattgacatggattatggaagcggctgatgacatttcttattgcgtggccgatctggaagacgcggtggaaaaaagaatattcagcgtcgaggagctgtatcagcatcttcatgatgcctggggagagcatgaaaaaggttctctgtttgcgcaggtcgtcgagaatgcctgggataaatcgcgttcaaattcgctgagccgcagtaccgaagatcagttctttatgtatttgcgggtgaacacgctgaataaactggtgccgtatgcggccgcccgtttcattgataatttgccgatgatatttagcggggaatttaatcacgccctgctggaagatgagagcagttttagtcagcttcttgaattatataaaaacgtggctgttcgccatgttttcagccacccggatgtcgagcagctggagctgcaaggataccgggttatcagcgggttgctggagatttatggcccgctgctccagctgacggtcgatgagtttagcgagctggcaaataatgaacgtgttcgccgcctgccgattgaatctcgtctctatcagaagctttcaacccgccaccggctggcatacattgaagccgtcagtaaaatagatcgccattcttcccaatggccagtcatggaatattattatcgctgtcgtcttatccaggactatatcagcgggatgacagatttgtatgcctgggatgaataccgcaagcttatggccgttgaataagccatgagttttgtaaagacgaccaataaatttttactttttccataaacttaatcccggaactaagcggtataaaacgaatctgagttacacagcaattttgcgttatctggtaaatcgagattgagaaacatgaaaaaaaccacattagcaatgagtgcactggctctgagtttaggtttagcgctgtcccctctggcgatggcggccgagacagcttcctcggcagcgactgcgcagcagatgccaagcctggccccgatgctcgaaaaagtgatgccatcggtggtgagtattaacgttgagggcagcacgaccgtcaatacgccgcgtatgccgcgtaatttccagcagttcttcggcgataattcgccattctgccaggacggctcgccattccagagttctccgttctgtcagggcggcggcgcaggggatgacggtcagggcggcggccagcagcagaaattcatggcactcggctcgggcgttattattgatgcagcgaaaggctacgtggtgaccaataaccacgtggtagataatgctaacaccattaaggtgcagatgagcgatggccgtaaattcgatgccaaagtggttggtaaagacccgcgctccgatatcgcgctgattcaaatccaggatccgaagaacctgacggcgattaagcttgccgactctgacgcgctgcgcgtgggtgactacaccgtcgccatcggtaacccatttggtctgggcgaaacagtgacctcgggtatcgtctctgcgctgggacgtagcggcctgaatgcggaaaactatgaaaacttcattcagacggatgcggccattaaccgtggtaactccggcggtgcgctggttaacctgaacggtgagctgatcggtatcaacaccgctatcctggcaccggacggtggcaacatcggtatcggctttgctatcccgagcaacatggtgaaaaacctgactgcgcagatggtgcaatatggacaggtgaaacgcggtgagctgggtatcatgggtaccgaactgaactccgagctggcgaaagcgatgaaagtggacgctcagcgcggcgcattcgtaagccaggtcatgccgaactcttcggcggcgaaagccggcattaaagcgggtgacgtgatcacctctctgaacggtaagccgatcagcagctttgccgccctgcgtgcggaagttggttctatgccaatcggcagtaaagtgaccctcggcctgctgcgtgaaggtaagccggttaacgtgagcctggaactgcaacagagcagtcagaatcaggtcgattccagcaccatcttcagcggtattgaaggtgccgagatgagcaacaaaggggcagataaaggcgtggtggtgaacaacgtgaaagcgaactcacctgctgcccgtatcggcctgaaaaaaggtgatgtgatcatgggcgctaaccagcagccggtgaaaaacatcgctgaactgcgcaaaattctcgacagcaagccgtccgtgctggcactgaatattcagcgtggtgatacctctatttatctcctgatgcagtaatcttcttaagcccctgttcgcaggggctttctcttttctgtgacctttcccacaactccatacatctctctctgcctttgggcatctgcacaatgcagccttagctgaacttccctatgcttgagctctgctcacgggagggttatatggctggctggcatcttgataccaaaatggcgcaggatatcgtggcgcgaaccatgcgcatcattgataccaatatcaacgtaatggatgcccgcgggcgcattatcggcagcggcgatcgtgagcgtattggggaattgcacgaaggggcgttgctggtgctttctcaggggcgcgtggtcgatatcgatgacgccgtggcgaaacatctgcacggggtccgtcaggggatcaacctgccgctgcgtctggaaggagagattgttggcgttatcggtctgacaggcgatcctgaatcgctgcgtaaatacggcgagctggtctgcatgacggcggagatgatgctggagcagtcgcgtctgatgcatctgctcgcccaggacagccgcctgcgtgaagagctggtgatgaatttgattcaggcggaggagcacacgcctgccctgagcgaatgggcgcagcgtctgggtatcgacctgaatcagccgcgggtggtcgccgttattgaggtggatagtggccagcttggcgtggacagcgccatggtggagctacagcagctgcaaaacatgctggcgacgccggagcgtaacaacctggtggcgattgtctctttgacggaaatggtggtgctcaagcctgcgcttaatcagtttggtcgctgggacgcggaagatcatcgtcgccgcgttgagctgctcatcgagcgcatgaaggagaacggacagctccgttttcgcgtcgcgctgggaaattattttaccgggccgggaagtattgcccgttcatggcgaacggcgcgcaccaccatgatggtgggtaaacagcgcatgccggagagccgcagttatttctatcnnnnnnnnnnnnnnnnnnnnnnnnnnnnnnnnnnnnnnnnnnnnnnnnnnnnnnnnnnnnnnnnnnnnnnnnnnnnnnnnnnnnnnnnnnnnnnnnnnnnnnnnnnnnnnnnnnnnnnnnnnnnnnnnnnnnnnnnnnnnnnnnnnnnnnnnnnnnnnnnnnnnnnnnnnnnnnnnnnnnnnnnnnnnnnnnnnnnnnnnnnnnnnnnnnnnnnnnnnnnnnnnnnnnnnnnnnnnnnnnnnnnnnnnnnnnnnnnnnnnnnnnnnnnnnnnnnnnnnnnnnnnnnnnnnnnnnnnnnnnnnnnnnnnnnnnnnnnnnnnnnnnnnnnnnnnnnnnnnnnnnnnnnnnnnnnnnnnnnnnnnnnnnnnnnnnnnnnnnnnnnnnnnnnnnnnnnnnnnnnnnnnnnnnnnnnnnnnnnnnnnnnnnnnnnnnnnnnnnnnnnnnnnnnnnnnnnnnnnnnnnnnnnnnnnnnnnnnnnnnnnnnnnnnnnnnnnnnnnnnnnnnnnnnnnnnnnnnnnnnnnnnnnnnnnnnnnnnnnnnnnnnnnnnnnnnnnnnnnnnnnnnnnnnnnnngatctgatgctgccggtcctgctcgacagcctgcgcggcggctggcaggccaacgagctggcgcgtccgctggtgcgtctgaaagcgatggacaacaacgggctgctgcgccgcacgttgcaggcgtggttccggcataacgtgcagccgctggcaacgtcaaaagcgctgtttattcaccgtaatacgctggagtataggctaaaccggatctcggaactgacggggctggatttagggaattttgacgaccggctactgctgtatgtggcgttgcagctggatgaacagagatgatgctgtttgccgggtggcggcttcgccttaccgggcctacatgtgttcgtaggcccggtaagcgaagcgccaccgggcaataaaacggctcatttgttacgcgtcaatttctcaagatccgcttcaatctcgctgatcttattggtgactacgctttccaggtgacgcaggtcgtcaaggatcttacgtttcagatcgacttcgctgcgatcgcgctggcagatttgatcgagttcgtcgatcacgtagcgcaggttagggctgatttcctgtacttctttatatccctgaccgataccgtcagcgacaacggtcttacgctggcgagggtatttaaacttcacgcttttggcgaagaactctcctttgtccttgtgaaaatagattttcaaaatatcgttattggcttcctggcgaagactataacgatcaatttcatcaggattggtaatgcccagacttttcagattatcgtacatagcggtacccttgatctcaacataacctatgaataattaacgaaaaaatctattttcgccaccttcggatataaaaaaagcggggttgcccccgctttttgttatacccgattaatcgatggtgcgcagcagttcattgatgcccactttaccgcgcgttttcgcgtccacttttttcacgatgaccgcacagtacaggctgtatttgccatctttagacggcaggttgccggaaaccacaacggaaccggctggaacgcggccgtagtgaatttcaccggtttcgcgatcgtaaatacgggtgctctggccaatataaacgcccatggagatcacagaaccttcttcgacgatcacgccttcaaccacttcggaacgcgcgccgatgaagcagttgtcttcgatgatggttgggttagcctgaagtggctccagaacgccaccgatgcccacaccgccggacaggtgaacgtttttaccgatctgcgcgcaggacccgacggtagcccaggtgtccaccatggtgccttcgtcaacgtaggcgccgatgttcacgtaggatggcatcagcacggtgttgcgtgcgatgaaggcaccctgacgaacggccgccggaggtactacgcggaagccctctttctggaagcgcgcttcgtcgtaatccgcaaatttcattggcactttatcgaagtagcggctttctgctccgtcgataacctggttatcgttgatgcggaaagagagcagcacagctttcttcagccattgatgagtaacccactgaccgtcgattttttctgccacgcgcagcgcgccggaatccagcagggaaataacctggtttaccgcttcacgggtcacggtatccacatttgccggagtgatgtcggcgcgacgctcaaaagcggactcaataacgttctgtaactgctgcattgtttactctttccatttcactaaaaaacacgtcaccctttatcgtttggattgagggctgctgtcaaccgttgttgcacttcaagttgcaggtcattattaagggcacgccggtcggccgtcgcgattataaataaatcttctactcgttcgccaatggttgtaattcgggcgccgtgaagcgaaattcccagatcggcaaaaacctgaccgacgcgggctagcagccctggctggtcgagcgcaatcagctcaaggaacgatttacggtcggtatgggtcggcaggaaattgacctcggtatcgacggtaaagtggcgcagttttgccgcctgacgacgcggctgcggaggttgccagctgcgctgcgtaatcgcctgctcgaggccaaagcgtatcccctcatgcctgtccgacgacagcgggctgccgtccggctccagcacaataaaggtgtccatcgccatgccgtcgcgggtggtaaaaatctgcgcgtcgtgcacnnnnnnnnnnnnnnnnnnnnnnnnnnnnnnnnnnnnnnnnnnnnnnnnnnnnnnnnnnnnnnnnnnnnnnnnnnnnnnnnnnnnnnnnnnnnnnnnnnnnnnnnnnnnnnnnnnnnnnnnnnnnnnnnnnnnnnnnnnnnnnnnnnnnnnnnnnnnnnnnnnnnnnnnnnnnnnnnnnnnnnnnnnnnnnnnnnnnnnnnnnnnnnnnnnnnnnnnnnnnnnnnnnnnnnnnnnnnnnnnnnnnnnnnnnnnnnnnnnnnnnnnnnnnnnnnnnnnnnnnnnnnnnnnnnnnnnnnnnnnnnnnnnnnnnnnnnnnnnnnnnnnnnnnnnnnnnnnnnnnnnnnnnnnnnnnnnnnnnnnnnnnnnnnnnnnnnnnnnnnnnnnnnnnnnnnnnnnnnnnnnnnnnnnnnnnnnnnnnnnnnnnnnnnnnnnnnnaaatctgatgcagcgcctcttcgttgatgttatccatgcgcagcagggccagcgcctgcaactgatggtggcgcacacgctcgcgcatgtcgggggtgttctgcatcccgcgacgcagctgtttttcggtggcgaagtagagttcgcgcagcaggctctgcttccagctgttccacagggtttcgttggtggcgcagatatcggctaccgtcaggcagaccaggtagcgcaggcggttctccgtttgcacttcctcggcgaactgcttgatcacttccggatcctgaatatcacgacgctgagcggtaactgacatcagcagatgatggcgaaccagccaggcgataagctgcgtttcacgcgagttcaggccgtgcagctcggcaaatttcagcacgtcctgggcgccgagtacggagtggtcgccgccgcgacctttggcgatatcatggaacagggcggcgatcaggatcagctccgggtgcgccagacgtggccacagatcaacgcacagcggatggcgggatcgcgtctcttctttagcgaagctttccagcttcagcatgacgcggattgtgtgctcatctaccgtataggcgtgaaacaggtcgaactgcatctgcccgacaatatgcgaccactggggcatataggcccacaatacgctgtgacggtgcatcggcagcagaccacggctgacggcgcccggatgacgaagcatgctcaggaacagcgagcgcgcctccgggatgtaacacagcggctgcttcagatggcgtcgtgcatggcgcagatgacgcagggtggtggagtagatcccggtgatcgtgctgttgcgcaccatggtgtagaacattcgcaggatcgcttccggttcgcgaatgaacaacgtttcgtcgcgcagatcgataagcgtgccgcgcagctgaaattcgtcatcaatcggacgcggtttttcgtctgccgtcagcgcgaggatcgcctcatcgaacagctgtaacagcatctggtttagctcagagacgcggcgggtgacgcggaagaaatccttcatcatttgctcgaccggctcgttgccctcgccctggtaattcaggcgctgcgccacgctgagctgtcggtcaaacagcaggcggttatcgtagcgggtgacttccaggtgcagggcaaaacggatgcgccacagcagatgcagacattcattgagttcgttacgttcggcttcggtcagaaaaccaaacccgaccatttcgtccagcgatgttgctccaaaatggcgacgggcgacccattgcagcgtgtggatatcgcgcaggccaccggggctgcttttaatatccggttcgagattatagctggtaccgtgatagcgctggtggcgctggttttgttcttcgactttcgcggcgaagaatttttaccgaaggccagaagccgtcgctaaagatgtgcttttgcagttcgaggaacagcgcaacgtcgccaatcagcaggcgggtttcaatcaggttggtggcgacggtcaggtcagataacccttccagcagacactcttccagcgtgcgtacgctgtggcccacttccagctttacgtcccagagcagggtcaacagttcaccgattttctgcgcccgatcgtccggcagttttttacggcttaagatcagcaggtcgatatcagagagtggatgcagttcaccccggccatagccgccgaccgcaaccagcgcgacgtcgctcacctggccgaaaccgtagtcgatccacagacgttgcaggagctggtcgataaattcggtgcgcgcttcaatgagctgttcggccgaaatgcctacgtcaaatgcgttacccagccagcgatggaaaacctccatgtgggctttgatatgcgcgcaggtcagctcatgcggtggccagacgcccgggttatcaggctggtcggggagggtgggaagtgctgtattagcatactgttcgggtaagagattactcatcgtgcgccacccataagaaaaagctatcgccattaaaaaagccggcattcgccggcttcttatcactcaatgttcgtcagtatcgccgggatggtgtcatccttgcgcaacgtcataatttcgcagccgttgtctgtaaccacaatagtatgctcgtactgagcagacaagcttctgtctttggtttttaccgtccagccatctttcatggtacggatgcggtaatcacccgcgttgaccattggttcgatagtgaaggtcatgcccttttgcagcactacgccgccgtcgtctgcatcgtagtgcagaacctgcggttcttcatggaacacacgaccaataccgtgaccgcaatattcgcgcaccacggagaaaccttccgcttccacaaatttctggattgcggcgccgatggtgcgcaggcggatgcccggcttcaccattttcagcgccaggtagaggctctcttgcgtcactttgcacagacgctcgcccagaatcgttggcttgccaacgatgaacatcttagaagtgtcgccgtggtactcgtctttaatcacggtcacgtcgatgttgacgatgtcgccatctttcagcagcttctcgtcatccggaatgccgtggcaaaccacttcattaatagagatgcagacggatttcgggaaaccgtgatagccaaggcaggcggagaccgcgtgctgctcgttgacgatatagtcgttacagatgcgatccagttcgccagtgctgacgcccggtttcacaaacggctcgatcatttccagcacgtccgcggccagacgaccggcgacgcgcatcttttcaatttcttcaggtgtcttaatagagatagccatgtaatctgtccatcggtgtcgattttttcgacaatactagtgtaagtgttgtcaatggtatcagtcaggcgcaccccgtgccaaattgagaatcattaacagcacactccgccaacaattattggtttctggccgtgttttgtgatataaagcgcgccggacttccgatccatctcagatacacaggctggacgggagcgacaaatctcactttgtgtaacaacacacacgtatcggcacatattccggggtgcccttcggggtcggtaatatgggatacgtggaggcataaccccaactttcaatatagaggttttaaacatggcaactgtttccatgcgcgacatgctcaaggctggtgttcacttcggtcaccagacccgttactggaacccgaaaatgaagcctttcatcttcggcgcacgtaacaaagttcacatcatcaaccttgagaagactgtaccaatgttcaacgaagccctggctgagctgaacaagatctcttcccgtaaaggtaagattctgttcgttggtactaagcgcgctgcaagcgaagctgtgaaagatgctgctaacagctgcgaccagttcttcgtgaaccatcgctggttgggcggcatgctgaccaactggaaaactgttcgtcagtccatcaagcgcctgaaagatctggaaacccagtctcaggacggtactttcgataagctgactaagaaagaagcgctgatgcgtactcgtgaactggacaagctggaaaacagcctgggcggtatcaaagatatgggcggcctgccagacgcgctgttcgtaatcgatgcagaccacgagcacatcgcaatcaaagaagctaacaacctgggtatcccggtattcgctatcgttgataccaactccgatccggacggtgttgacttcgttatcccgggtaacgacgacgcaatccgtgctgttagcctgtacctgagcgctgtagctgctaccgttcgtgaaggccgttcccaggatctggcttctcaggcggaagaaagcttcgtagaagctgaataataaggttttaccccttattagtaccgtgtatgaataggggcccattatcggccccttttttcaatttatactgtttggctcccggccgggcagttcacatctcccgaggatttaagaatggctgaaattaccgcatccctggtaaaagagctgcgtgagcgtactggcgcaggcatgatggattgcaaaaaagcgctgaccgaagcgaacggcgacatcgagctggcaatcgaaaacatgcgtaaatccggtgcgatcaaagcagctaagaaagcaggcaacgttgctgctgacggcgtgatcatcaccaaaatcgacggcaactacggcatcattctggaagttaactgccagactgacttcgttgctaaagatgctggtttccaggcatttgctaacaaagttctggacgcagcggttgcaggcaaaatcactgacgttgaagttctgaaagcacagttcgaagaagagcgtgtagcgctggttgctaaaatcggtgagaacatcaacatccgtcgcgtttcttccctggaaggcgatgttctgggctcttaccagcacggcgcgcgtatcggtgttctggttgcggctaaaggcgctgacgaagagctggttaaacagctggcaatgcacatcgctgcaagcaaaccagaattcgttaagccagaagacgtgtctgctgaagtggtagagaaagagtaccaggttcagctggacatcgcgatgcagtctggtaagccaaaagaaatcgcagagaaaatggttgaaggccgcatgaagaaattcaccggcgaagtttctctgactggccagcctttcgtaatggatccaagcaagtctgttgctcagctgctgaaagagcacaacgctgatgtaactggcttcatccgcttcgaagtgggcgaaggcatcgagaaagttgagactgacttcgcagcagaagttgctgcaatgtccaagcagtcttaatgattgaaaaggagccgcctgagggcggcttctttttgtcacccgtctcacgaaatcagacaggctccagtattgctgtgctgatttgcgacatatcatgtcgccagaattaaccccatcttaatcgttgacagtctcaggaaagaaacatggctaccaatgcaaaacccgtgtacaaacgcattctgcttaagctgagtggcgaagcgctgcaaggatcggaaggcttcggtattgacgcaagcatccttgatcgcatggcacaggaaatcaaagaactggtcgaactgggtattcaggttggcgtggtcattggcggtggcaaccttttccgtggtgctggtctggcgaaagcggggatgaaccgcgtagtgggcgaccacatgggtatgctggcaaccgtgatgaatggcctggcgatgcgtgatgcgcttcatcgcgcctatgtgaacgctcgcctgatgtccgctattcctttgaatggcgtatgcgataactacagctgggcagaggccatcagcctgctgcgcaacaaccgcgtggtgatcctctccgccggtacgggtaacccgttctttaccaccgattccgcagcctgtctgcgcggtatcgaaatcgaagccgatgtggtgctgaaagcgaccaaagtagatggcgtgtttactgccgacccggcaaaagatccttcagcgaccatgtacgatcagctgacctacagcgaagtgctggaaaaagagctgaaagtgatggatcttgccgcctttacgctggctcgtgaccacaaactaccgatccgtgtcttcaacatgaacaagcctggcgcgctgcgtcgcgttgttatgggcgaaaaagaaggcactttgatcacggaataatttccgtcggcgataaatacaggtaagattccgctttatttcgacgtggtatcttacccgggcgcgcctttggcgttgtcatgaattaaacgcgactatacttagcacacctgtagcgctgtgctggcggatagtctgcctgagacaagttttcaaggatccgtaacgtgattaacgacatcagaaaagatgctgaagtacgcatggaaaaatgcgtagaagcgttcaaaaaccaaatcagcaaaatccgtactggccgtgcttccccaagcctgctggatggcattatcgtagaatattacggtacgccaacgcctctgcgtcagctggcgagcgtgacggtagaagatacccgtaccctgaaaatcaacgtgttcgaccgctcaatgagcccggccgttgaaaaagcgatcatggcatccgacctgggtctgaacccaagctcagccggcgcggatattcgcgttccactgcctccgctgacggaagagcgtcgtaaagacctgatcaaagtagttcgtggtgaagctgagcagggtcgtgtttccgtacgtaacgtgcgtcgcgatgcgaacgataaagtgaaagccctgctgaaagaaaaagagatcagcgaagacgacgatcgtcgttctcaggacgacattcagaaaatgaccgacgcggccatcaagaaaattgatgcggcgctggcagaaaaagaagcggaactgatgcagttctgattttcgctgtacactgataaacgccgttcagaaggacattgagtcttgctggcggcgttttgcttttatctggtctaacttttgggcatctcatgaagcatctcactctcctcggctcgaccggctctatcggttgcagcactctcgacgttgtacgtcataatcctgacagctacaccgtggccgcgcttgtggccggaaaaaacgtgcagcgaatggtcgaacagtgcctggagtttaccccccgttttgcggtgatggatgacgaagagagcgcccgccaggtgaaagcgttgttgcaggagaagggctgccgtaccgaggtactcagcgggcaacaggcggcgtgcgatatggccgcgcttgatgaagttgatcaggtcatggcggcaatcgtcggggcggcgggtcttctgccgacgcttgccgctattgatgcgggtaaagatgtcctgcttgcgaacaaagagtcgctggtcacctgcggacgcctctttatggaagcggtaaaacagcgtggggcgcgtcttttgccggtcgatagcgaacacaacgcgatttttcagagtttacctcaaccttttcaacaaaacctggggtacgctgacctggagcagaatggcgttgtgtcgattctgcttaccgggtctggtggcccgttccgtgaaacgccactgtctgaattgagcgcaatgacgccggatcaggcgtgtcgtcatccgaactggtcaatggggcgtaagatctccgtcgattcggccaccatgatgaacaaaggtctggaatacattgaagctcgctggctgttcaatgcgtcggcgaaacagatggaagtgctgatacacccgcagtcggtgattcactcgatggtgcgctatcaggacggcagcgtgctggcccagctgggcgaaccggatatgcgtacgcctattgctcatacgatggcgtggccaaaccgcgtaaaatcgggcgttaagcctctcgatttttgtaagctgagttcactgacgtttagcgagcctgattacgaccgttatccctgtctgaaactggcgatgacggccttcgatcaggggcaggcggcgacaacggcgcttaatgcagccaatgaagtgaccgttgaagcattcctgaatcagcagatccgctttactgacatcgccgcgttgaatttatccgtgctggagataatggatttgcgtgagccgcagagcgtggaagaggtgctggccgtggatgaacaggcacgcattgttgcgcgtaaacaggtgacacgtctcgcaagctggtgataaagcaagcactagtcgtcgtgctatttgttagcgttgggcttcagtgatatagtctgcgccacctgatcgcaggtatttggctttaagtggtcaggtaagccgtggtttgacacggcttttttatgtataggcttcagtattcctgtgtaccgttaaatcctttcagggactaaaaacgcgttatgttgtctgcgaatcaaccaataagcgaaaacttgccagcacatggctgtcgccatgttgcaatcatcatggatggcaatggccgctgggcgaaaagacaagggaagatacgagcctttgggcataaagctggggcgaaatctgttcgccgcgccgtctcttttgccgccaataacggcattgatgcgttaacgctctatgcttttagcagtgagaactggaatcgacctgcgcaggaagtgactgcgttgatggaactgttcgtgtgggcgctcgatagtgaagtaaaaagcctgcaccgccacaacgtccgcttgcgtattattggcgaaaccagtcgttttaactcacgtttgcaggaacggattcgcaaagcagaagcgctgacggaaaataataccggcctgacgctcaatatcgcggcgaattacggcggacgctgggatattatccagggggttcggcatttggctgagcaggttcaggaagggctgttaagacccgaccagattgatgaagaggcgctgagtcagcaaatctgcatgaatgaactggcacccgtggatttggttataaggacagggggggaacatcgcataagtaactttttgctgtggcaaattgcctacgccgaactttactttacggatgttctttggccagattttgatgaacaagactttgaaggtgcgctgcatgcctttgccaatcgagagcgtcgtttcggcggcaccgagcctggtggcgataacgcctgatgggggtagcttttgctgaagtatcgcctgatttccgcttttgtattaatacccgtcgtcatcgcagcgctgtttttactgcctccggtgggattcgctattgttacgctggtggtgtgtatgctcgccgcgtgggaatgggggcagcttagcggctttacctcgcgcactcagcgggtatggctggcggtactctgtggttttttactggccctgatgctgtataccttgcctgaatatcatcatgatgttcaccagccgctggttgccggatccttatggatatcgctggcctggtggattgctgcgcttgttttagtgcttttctatccgggctctgcggcgatctggcgtaactctaaagtgttgcgccttatttttggtctgctcacgattgttccgtttttctgggggatggttgcgttgcgcgcctggcactatgacgaaaaccactacagcggcgcgatatggctgctttatgtgatgattctcgtctggggggctgactccggggcctatatgtttggtaaactgttcggtaaacataaactggcgccaaaggtttctccgggtaaaacctggcaaggcttcatcggcggcctgtttacggcagcgattatctcctggggctatggcgtctgggcgaatcttgaggttgccccctcgacgctgctggtatgttcgattttcgcggcgctggcatcggtgctgggtgatttaaccgagagtatgtttaagcgtgaagcagggattaaggacagtggtcacctgattccaggacatggcggaatactggatcgcattgacagccttaccgcggctgttcccgtatttgcttgcctgcttttactggtgtttgggacgatataacggaaggttttatgctgagcattctctggaatctggcggcgttcattgttgcactgggtgtactgattaccgtgcatgaatttggccatttctgggttgcccggcgctgtggtgtgcgggtggagcgattctcgattggctttggcaaatcgctctggaagcgcaccgataagcatggcaccgagtttgtcattgctctgattcccctgggcggctatgtcaaaatgctcgacgaacgcgttgagcctgtcgccccggaacttcgccatcgcgcgtttaacaataaaactgttggacaacgtgctgccatcatcgctgccggcccggtagccaatttcatcttcgctatcttcgcctactggctggtgtttatcatcggcgtgcctggcgtgcgcccggttgtgggcgaaatcactacgggttctattgcggcaacggcgcaaattacaccgggaatggaacttaaagcgattgatggtatcgaaacccctgattgggatgccgtgaggttacaactggttgccaaaattggtgatgagcagacaaccgtcagcgtatcgccatttggttccgaccagcggcaggaaaaagtgctggatttacgccactggcgctttgagccagacaaagaggaccctgtcgccgcactcgggattcgaccgcgcggcgcgcagatcgagccggtattagccgaagtacaggccaaatcggcagcgagtaaagcaggtttacaagctggtgacaggatcgttaaagtcgatggtcagccattaacacaatggatgacctttgttactctggtgcgcgataatccaggcaagccgctcgcgctggaagtggaaaggcaggggagttcgctctcactgactctcaccccggataccaaatcgggcggcggtaaggcggaagggtttgcaggcgttgtgccgaaagtgatcccactgccagatgagtacaagacaatacgccagtatgggccgtttagcgccatcgttgaggccacggataaaacatggcagctgatgaagcttacggtcaacatgttggggaaattgataaccggtgatgtgaaactgaacaacctcagtgggccaatttcgattgctcagggggctgggatgtcagcggagttcggggtgatttactatctcatgttccttgcgctgattagcgtgaacctggggataatcaacctgttcccgcttcccgtattagatgggggccatctgctgtttttagcgattgaaaagctaaaaggcggaccggtatccgagcgagttcaagactttagttatcgcattggctcgattttgctggtgctgttaatggggcttgcacttttcaatgatttctctcggttgtaagagagttagttaggaagaacgcataataacgatggcgatgaaaaagttgctcatagcgtcgctgctgtttagcagcgcgaccgtatacggtgctgacgggttcgtagtgaaagatattcatttcgaaggccttcagcgtgtcgccgttggtgcggccctcctcagtatgcctgtgcgccccggcgatacggttaatgatgaagatatcagtaacaccatccgtgctctgtttgccactggcaactttgaggatgtccgcgtcctgcgcgatggtgatacgctggtggttcaggtaaaagaacgtccaacgattgccagcatcactttctccggtaacaaatcggtgaaagacgacatgctcaagcagaaccttgaggcatcgggtgttcgtgtgggggaatctctggaccgcacaacccttgcagacattgaaaaaggtctggaagatttctactacagcgtcggtaaatacagcgcgagcgttaaagcggttgttacaccgctgccacgtaaccgtgttgacctgaaactggtcttccaggaaggtgtttctgcgaagatccagcagatcaacatcgtgggtaaccacgcgttcagcaccgacgaactgatctccaacttccagctgcgtgacgaagtgccgtggtggaacgtggtgggcgatcgtaaataccagaaacagaaactggcgggtgaccttgaaaccctgcgcagctactatctggatcgcggttacgcccgtttcaacatcgattcaactcaggtgagtctgactccggacaagaaaggtatctacattaccgttaacatcacagaaggcgataagtacacgctttcgggtgttgaagtcagcggcaacctggcaggacattcagctgaaattgaatctctgaccaaaattcagccgggcgatctgtacagcggatctaaagtcaccaaaatggaagacagcattaagaagctgctcggccgttatggttatgcgtatccgcgtgtgcaaacgcagccggaaattaacgacacggataaaaccgttaagctgcacgttaacgttgatgcgggcaaccgcttctacgtgcgtaagatccgcttcgaaggtaacgatacctctaaagactccgttctgcgccgtgaaatgcgccagatggaaggggcatggctgggaagcgatctggtagatcagggtaaagagcgtctgaaccgtctgggctacttcgaaacggtcgataccgatactcagcgtgtaccaggtcgtccggatcaggttgatgttgtttataaagttaaagaacgtaataccggtagcttcaacttcggtattggttacggtactgaaagtggcgtgagcttccaggtcggtgttcagcaggataactggctgggtacgggctactctgtcggtatcaacgggacgaaaaacgactaccagacctactctgagttctccgttaccaacccatacttcaccgttgacggtgtaagcctgggcggtcgtatcttctataacgactttaaagcggacgacgcggacctctcctcgtataccaacaagagttacggtctggatggtacgcttggcttcccggttaacgaatacaacaccttgcgcgcaggtttagggtacgtgcataacgacctgtccaacatgcaaccgcaggtggcgatgtggcgttacctggactccatcggtcagtcggcgagtacgtccagcgatgacaacggtttcgccgcggatgacttcaccttcaactacggttggacctacaaccgtcttgaccgtggctacttcccgacggaaggttcacgcgtcaacctgaacggtaaagtgactattccgggctcggataacgagttctacaaggtcacgctggatacggcgtcctacttcccaattgatgaagatcacaagtgggttgttctgggtcgtacccgttggggttatggtgacggtattggaagcaaagaactgccgttctatgaaaacttctacgccggtggttcaagcaccgtgcgtggcttccagtccaataacattggtccgaaagcggtttattacggcggtaatgacgaagataactgcgcaagccgtgatcctaagcaagtatgtagctctgatgacgcagtaggtggtaacgctatggccgtggcgagcctcgagttcatcacgcctacgccgtttatcagtgataagtatgcgaactccgtgcgtacctccttctttatggatgcaggtacggtgtgggacaccaactgggagaacaccgcccagatgcgtgcggcgggggttccggactacagcgatccgagcaacattcgcatgtccgcaggtatcgcattacaatggatgtcaccgctggggccgttggtcttctcttacgcccagccgtttaagaaatacgatggagacaaagcggagcagttccagtttaacattggtaaaacctggtaataatccgctgcaatggaatgcgttggcagtgtagcgctgacaaccggcgatcggtaacacggtcgccttgccacgcaaagaacggtacccctcgggtgccaatgggatggtaaggagttaattgtgaaaaagtggttattagctgcaggtctcggtttagcgatggcaacttctgctcaggcagcggataaaattgcaatcgtcaacatgggtaatttgttccagcaggttgcacagaaaaccggtgtttctgcaacgctggaaaacgaattcaaaggccgtgcgagcgaactgcaacgtatggaaggtgatcttcagtccaagatgcagcgtcttcagcgtgatggttctaccatgaaagcgagcgagcgcagcaaactggaaaaagacgtcatgtctcagcgccagaccttctctcagaaagcacaggctttcgagcaggatcgtcagcgtcgttctaacgaagagcgtggcaaactggtgacgcgtattcagtctgccgttaaagcagtagcagccgatcagagcatcgatctggttgttgatgcgaacgccgttgcattcaacagcagcgatgttaaagacatcaccgctgatgttctgaaacaggttaaataagtaatgccttcaattcgactggctgatttagctcagcagttggatgcagaattacacggtgatggcgatatcgtcatcaccgctgttgcgtccatgcaatctgctaaagcaggcactattaccttcatggtaagccctaagtaccgtgaacacctggcccagtgccaggcgtctgccgttgtgctgacgcaggacgatcttccgtttgccactagcgctgcactggtagtgaaaaatccctacctgacctatgcgcgcatggcccaaattcttgataccacgccgcagccggcacagaacattgcagccagtgctgcgattgatccgacggctcagctgggtaacaacgtatcagtcggcgcaaacgccgttatcgaatccggcgttgttttgggtgataacgtggtgattggccctggctgctttgttggaaaaaatacgaaaattggcgcagggtctcgtctgtgggccaatgtctctgtctaccatgaggttgagattggcgagaattgtctcgttcagtccagcacggtgattggttctgacggatttggttacgccaacgatcggggtaactgggttaagatccctcagctggggcgcgtgattatcggcgatcgtgtggagatcggcgcttgtacaactatcgaccgcggtgcgcttgacgacaccattattggtaacggtgttatcatagacaaccagtgccagattgcacataacgttgtgattggcgacaataccgcagttgcgggtggtgttatcatggcaggcagcctgaaaattggccgttactgcatgattggcggtgccagcgtgatcaatggccatatggaaatatgcgacaaagtcacggtgacggggatgggtatggtgatgcgtccaatcactgagcctggcgtttattcctcaggtattccgctgcaaccgaacaaggtctggcgtaaaacagctgcactggtgatgaatattgatgatatgagcaagcgactcaaagcgattgagcgcaaaatcgatcaacaagactaagcgttcatccgtttaacgctaaatttcccggcctgtcggctttgtttataaaccggcaggccgtgttattattgctacttagtacatttgacaggaagagtattttgactactgacactcatactctgcatattgaagagattttagaacttctgccgcaccgctatccgtttttactggtagaccgtgtgctggattttgaagaaggtcgttttctgcgcgcagtgaaaaatgtctccgttaacgagccgttcttccaggggcacttccctggtaagcctatcttcccgggtgtattgatcctggaagcgatggcacaggctaccggtattctggcgtttaaaagcgtaggtaaactggaaccgggtgaactctattacttcgcgggtatcgatgaagcgcgcttcaagcgtccggtcgtgcctggtgatcaaatgatcatggaagtcacttttgaaaaaacgcgtcgcggcctgactcgcttcaaaggcgtagctatggttgacggcaaagttgtttgcgaagcgacaatgatgtgtgcgcgtagccgggaggcctgatacgtgattgataaatccgcctttattcatcctaccgccattgtggaaacgggtgccatcattggtgccaacgtccacattggcccgttttgtattgttggaccccatgtcgaaattggtgagggtacagtactgaaatctcacgttgtcgtgaatggtcataccaccattggctgcaacaatgagatctatcagttcgcctccatcggcgaagttaaccaggatcttaagtatgctggcgaaccgacccgcgtggaaatcggcgatcgtaaccgcattcgcgaaagcgtcaccattcatcgtggtacaacgcaaggcggtggattgacgaaggtgggcagcgacaacctgtttatggttaatgcgcacattgcgcacgactgtaccgtgggtagccgctgtattctcgccaacaacgcaacgctggcgggacacgtatcggtcgatgatttcgcaattattggcggcatgaccgcagtccatcagttctgcatcattggtgcacacgtgatggtcggcggatgctccggtgtggcgcaggacgtcccaccgtttgtgattgcgcagggcaaccatgccacgccgtttggcgtgaacatcgaaggtctcaagcgtcgtggttttagtcgcgaagcgattactgcgatccgcaacgcgtacaaactgctgtaccgtagcggtaaaacgctggaagaggctaagccggaaattgccgagctggcgaataagcaccctgaagtgaaaacgttcatggaattctttgaacgttcaacccgtggtctgattcgttaatggtcgacagtcgtccgcttaccatcgccctggtcgccggagaaacctccggcgatattcttggtgcaggtcttatccgcgcgcttaaagcccgtgtacccaatgcccgctttgtgggcgtggctgggccgctgatgcaggccgaaggctgtgaagcctggtatgaaatggaagagctggctgtgatgggcatcgtcgaggtgttggggcgcttgcgtcgcctgctgcatattcgcgccgaccttacccgccgctttaccgaccttaagcccgatgtatttgtcggcattgatgcgcctgatttcaatattacccttgaagggaacctgaaaaagcaggggatcaaaactatccattacgtcagtccgtccgtgtgggcgtggcgacagaaacgcgttttcaaaatcggacgatccactaatctggtgctggcttttctgcctttcgaaaaagcgttttacgacagatttaatgtcccgtgccgttttatcggtcataccatggcggatgccatgccgctggatccggataaaaacgcggcgcgtgacgaactgggcatcccgcatgatgtgcactgtctggcgctgctgccagggagccggggtgcggaagttgaaatgctcagtgccgatttcctgaaaacggcgcaaattcttcgcaagacttaccccgatcttgaagtggtcgtgccgctggtgaatgccaaacgccgcgagcagtttgagcgtatcaaagctgacgtcgccccggatcttcacgtccgcctgctggacgggaaagggcggcaagccatgtttgcgagcgatgccgcactactggcttccggcacggctgcgctggagtgtatgctggcaaaatgcccaatggtggtcggttatcgcatgaagccgtttaccttctggctggcaaaacgtctggtaaaaacagattacgtatccctgccaaacctgcttgcgggtcgcgagctggtgaaagagctcttgcaggatgaatgccagccgcaggcgctggctgatgcattactgccgctgctggccaatggtaaaaccagccaccagatgcatgataccttccgtgaactgcatcaactgatccgctgtaatgctgatgagcaggcggccgatgcggtgctggagttagcacaatgatggaatttatttatccccatacccacctcgttgccggtgtggatgaagtcggtcgtggcccgttagtgggtgccgttgtgaccgcggcggtgatcctcgatccagcccgcccgatcgttggcctgaacgactcgaaaaaactgagtgaaaagcgtcgcctggcgctgttcgatgaaattaaagaaaaggcactggcctggagtctcgggcgcgcagagccggatgagatcgacgatctgaacattctgcacgccaccatgctggcgatgcagcgtgccgttgctggcctgaagattgtgcctgagtatgtgctgatcgacggtaaccgttgcccggcgctgccgatgccttccatggctgttgttaaaggcgatagccgcgtcgcagaaatcagtgcggcgtcaatcattgccaaagtgacgcgcgatgccgaaatggccgcgctggacctcacttatcccgcgtatggtttcgcccagcacaagggatatccaacggctttccatctggaaaagctggctgaacatggcgcaactgaacatcatcggcgcagctttggcccggtgaaacgcgcgctgggactggtgtcctgaatcaagacgcaagcaattaagtaacgcgggatttgaagatggctgaaccacgtttcgtacacctgcgggtgcatagcgactactccatgatcgatgggctggcaaagaccgggccgctggtaaaaaaggcggcctcgcttggcatgcctgcgctggcgatcaccgattttaccaacctgtgtggcctggtgaagttctacggaacggcgcatggcgcaggattaaagcccatcgtcggcgcggattttcatgtgcagagcgagctgctcggcgatgagatgacgcagatttccgtgttagccatgaataacacgggttatcagaacctcactctgctgatctcaaaagcctaccaacgcggttacggcgcactgggtccatggattgaccgcgactggctggcggagctgaacgaaggtttgctgctgatctccggtggccgtatgggagatgtcggcaaatgtctgctgcgcggtaataacgcgctggtggatcagtgcgtctcgttctacgaagagtatttcccggatcgttattacctggagctgatccgtaccggacgtgcggacgaagagagctatctgcatgcggccgtcgccctcgcggaagcgcgtggcctgcctgtggtggccaccaacgatgtgcgcttccttgagccgggtgattttgacgcgcatgaaattcgcgtcgccatccacgacggcttcaccctcgacgatccgaaacgtccgcgcaactactcatcgcagcagtacatgcgcagcgaagaggagatgtgtgagcttttctcggacatcccggaagcgctggaaaacagcgtagagattgccaagcgctgtaacgtcaccgtgcgtctcggcgaatacttcctgccgcagttcccgacgggcgacatgaccaccgaagatttcctggtcatgaaatcgaaagagggtctggaagagcgtctggaattcctcttcccggatgaagcggtccgtaaagagaagcgtcctgaatatgacgagcgcctggatattgaactccaggtgatcaaccagatggggttcccaggctacttcctgatcgtgatggagttcatccagtggtcgaaagataacggcgtgccggtaggcccgggccgtggttctggtgccggctcgctggtggcgtatgccctgaaaatcaccgatctcgatccgctggaatttgacctgctgttcgaacgtttcctcaacccggaacgtgtctccatgcccgactttgacgtcgacttctgcatggaaaaacgcgaccaggtgattgagcacgtggccgatatgtacggtcgtgatgcggtttcgcagatcattaccttcggtacgatggccgcgaaagcggttatccgcgacgtgggccgcgttctgggccacccgtacggttttgtcgatcgtatctctaagctggtgccgcccgatccgggcatgactctggcgaaagcctttgaagctgaacctcagctgccggaaatctacgaagccgacgaagaggtcaaagcgctgatcgacatggcgcgcaagctggaaggcgtcacgcgtaacgccggtaagcatgcggggggcgtggttatcgccccgaccaaaatcaccgactttgcgccgctgtactgcgacgaagcgggccagcacccggtcacccagttcgacaagaacgacgtagaatacgccgggctggtgaagttcgacttcctcggcctgcgtacgctgaccatcatcaactgggcgctggagatgatcaacgcccgtcgcgagaagaacggcgaaccgccgctggatatcgcggctatcccgcttgatgacaagaaaagtttcgacatgctgcaacgctcggagacgacagccgtcttccagcttgaatcccgcggcatgaaagatttgattaagcgtctgcaaccagactgcttcgaagatatgatcgcgctggtggccctgttccgtccggggccgttgcagtcggggatggtagataactttatcgaccgtaaacatgggcgcgaagagatttcctacccggacgtgcagtggcagcatgaaagcctgaaaccggtactggagccaacctatggcatcatactgtatcaggaacaggtcatgcagatcgcccaggtgctttctggttatacccttggcggcgcagacatgctgcgtcgtgcgatgggtaagaaaaagccggaagagatggccaagcagcgttccatctttgaggatggggcgaagaaaaacggcgtcgatggcgaactggcgatgaaaatcttcgacctggtggagaaattcgccgggtacggatttaacaaatcccactccgccgcctatgctttggtttcgtatcaaacgctgtggctgaaggctcactatcccgctgagtttatggcggcggtaatgaccgccgatatggacaacaccgagaaggtggttggcctggtggacgagtgctggcgcatggggctgaagatcctgccgccggatattaactctggcctgtaccatttccacgttaacgatgacggggaaatcgtctatgggatcggcgcgatcaagggcgtaggtgaggggccgatcgaggcgatcatcgaagcgcgtaacaacggcggctatttccgcgagctgttcgatctgtgcgcccgcaccgataccaaaaaactgaaccgccgggtgctggaaaaactgatcatgtccggcgcgtttgatcggctggggccacaccgcgccgcgctgatgaactcgctcggcgatgcgctgaaagcagccgatcagcacgcgaaagcggaagccattggccaggcagatatgttcggcgtgctggcggaagagccagagcagattgagcagtcttattccaactgccagccctggccagaacaggtggtgctggatggggagcgggaaacgttaggcctgtacctgacggggcacccgatcaaccagtatctgaaagaaattgagcgctatgtcggcggccacaggcttaaagacatgcatccgacagaacgtggtaaaatcaccacggctgcggggctcgtgattgctgcaagggtaatggtcaccaagcgcggcaatcgtatcggcatctgtaccctggatgaccgttccgggcgtctggaggtgatgttgttcaccgacgcgctggataaataccagcaattgctggaaaaagaccgcatacttatcgtcagcggacaggtcagctttgatgacttcagcggggggcttaaaatgaccgcccgcgaagtgatggacattgacgaagcccgggaaaaatatgctcgcgggcttgctatctcgctgacggacaggcaaattgatgaccagcttttaaaccgactccgtcagtctctggaaccccaccgctcggggaccattccagtacatctctactatcagagggcggatgcacgtgcgcggttgcgctttggtgcaacgtggcgtgtctctccgagcgatcgtttactgaacgatctccgtggcctcattggttcggagcaggtggaactggagtttgactaatacaggaatactatgagtctgaatttccttgatttcgaacagccgattgcagagctggaagcgaaaatcgattctctgacagccgtgagccgtcaggatgaaaaactggatattaacatcgacgaagaagtgcatcgtctgcgcgaaaaaagcgtagaactgacgcgcaaaatctttgccgatctcggcgcatggcagatcgcccagctggcgcgtcatccacagcgtccgtacaccctggattatgtccgcctggcgtttgacgaatttgacgaactggcaggcgaccgcgcatacgctgacgataaagctatcgtcggcggtatcgcgcgtctggatggacgtccggtgatgattattggtcatcagaaaggccgtgaaaccaaagagaaaatccgtcgtaacttcggtatgccagcgccagaaggctaccgtaaggccctgcgtctgatggagatggctgagcgtttcaatatgcctatcatcaccttcatcgacacgccgggtgcttacccgggtgttggcgctgaagaacgcggtcagtctgaagccatcgcacgcaacctgcgtgagatgtctcgcctgaaagtgccggtcatctgtaccgttatcggtgaaggtgggtccggcggtgcgctggcaattggcgtgggcgataaagtgaatatgctacagtacagtacctattccgttatctctccggaaggctgtgcctccattctgtggaaaagtgccgataaagcgccgctggctgctgaagcgatgggcatcattgccccacgtctgaaagagctgaagctgatcgacaccgttatccctgaaccgctgggcggcgcgcatcgtaagccggaagtgatggctgcttccctgaaagcgcagctgctggcagatctggcggacctggacgtgctgagcacagaagatctgctcaaccgtcgttatcagcgtctgatgacctacggttacgcgtaagcctcacaattatcctaaaagccgcacattgttgcggctttttttatacctgccgtttaccttaactatgcttatctgatgtttttcaaggaggtaaaccatgaacatcattgccatcatggggccacacggcgtcttttataaagacgaacccatcaaggagctggagcaagccctcaaagcacgcggataccagctgatctggccgcaaaacagcgccgacctgctgaaatttatcgaacacaatccgcgcatctgtggcgtgatattcgactgggacgaatacgacatggagttgtgcagcgatatcaataagctcaacgaatatcttccgctgtacgcgtttatcaacactcactcgaccatggacgtgagcgcgcatgatatgcgtatggcgctgtggttcttcgaatactcactcggcgttgccgaggacattgcgacccgcattcagcagtacaccggtgaatacctcgataacatcacaccgccgttcacgcgcgcgctgttcacctatgtgaatgaagggaagtacaccttctgtacgccaggccacatggcgggaacagcctatcaaaaaagcccggtgggatgtctgttctacgatttcttcggcggtaacacgctgaaggcggatgtgtcgatttcggtcaccgagttaggctctctgctggatcataccggcccgcatctggaagccgaagagtacatcgcccggacctttggcgccgagcaaagctacatggtgaccaacggtacctcaacctcgaacaaaatcgtcgggatgtacgccgcgcctgccggcagtacgctgctgattgaccgaaactgccacaaatcactggcgcatttgctgatgatgagcgacgtggtgccgctctggctgtcgcctacgcgtaatgcgctgggtattctcggcggcattcctcgccgtgaattcgcgcatgaagccattgaaaataagatcgcagcgatccccgaggcaagctggcctgtgcacgcggtgatcaccaactccacctatgacgggctgctttacaacacgaactggatcaagcagacgctcgacgtgccgtcgatccactttgactccgcgtgggtgccttacaccaatttccacccgatttactcgggtaaaagtgggatgagcggcgagcgggtgccgggcaaggtgttcttcgaaacgcagtcgacgcacaaaatgctggccgcgttttcccaggcgtctctcattcacatcaagggcgagtacgacgaggacaccttcaacgaagcctttatgatgcacacgaccacgtcgccgagctacccgctggtggcgtccatcgaaacggcggcggcgatgctgcgcggtaatccgggtaaacgcctgatcaatcgttcggtggaacgggcgctgcatttccgaaaagaggttcagcgacttaaagatgaagcggacggctggttctttgatatctggcagccggaagagattgatgaggcagaatgctggcccgtcgcgccgggggagagctggcacggtttccgggatgccgatgcggaccacatgttcctcgatccggttaaggtgacgatcctgacgccgggcatggatgagcagggtgtgatgggtgaggaagggatcccggctgcgctggtggcgaagttccttgatgagcgcggcgtggtggtggagaaaaccggcccctataatttgctgttcctgttcagcatcgggatcgataaaacccgcgcgatggggctgttgcgcggactgatggagtttaagcgtgcatatgatctgaacctgcgggtgaagaatatgctgccggatctctacgcggaagatcctgacttctatcgcaatatgcgtattcaggatctggcccaggggatccacaggctgatccgccagcacgatctgccgcgcctgatgttgcaggcatttgatgttctgcctgaaatgaagctgacgccgcacagggcgtggcagcgccaggtgaaaggggaggttgaaaccgttgagctggagaacctggtcgggcgggtatcggccaacatgatcctgccttatccgccgggcgtgccgctgctgatgccgggtgaaatgatcaccgaggagagccgggcggtgctcgatttcctgctgatgctctgttcggtagggcgccactatccgggctttgaaacggacattcatggcgcgaaacgcgatgataacggcgtgtactgggtgagagtcctaaaataaaagggtctgcttgccaggggcgggttgtcggttgtaacgttcagagcatcataaaaaggagaaactatgctgggtttaaaagcggttcatcatattgcgatcattgccaccgattacgcgaaaagtaaggcattctactgcgacgttctcggctttacgctgttgagcgaggcttaccgtgaggagcgcgactcctggaaaggcgatctggctttaaacggacaatatgtgattgaactgttctcttttcctttcccgccagcgcgtccttcacgcccggaagcctgcggcctgcgccacctggcattcagcgtcgatgacctggacagcgcggtaaaacatctggaagcccacggcgtggcctgcgaagcgattcgtgtcgatccctttaccgataaacgtttcacttttttcaacgatccggacgggctgccgctggagctttaccagcagtaatcgccgtcatgtgtgataatgcccgttcagttcgggcattttttatgtgtaatttcctatgaccttacccgctatcgcgcatgccgtttcaccctaccgccagctgctggtggggttcagcggtggcctggattccaccgttttgctgcaccgccttaagctctggcgcgaccgtgagcctgacgtccagctgcgggcgatgcatatccatcacggcttaagcccccatgccgacgactgggtagcgcactgcgaagcggtgtgttcagggtgggcgattccgctgatcgttgaacgcgtcacgcttgaggatgaggggctgggtattgaggcgcaggcgcggaaagcccgctacgccgcgttttccggcgcattacagcaaggggaagcgttggtcaccgcgcagcatctggacgaccagtgcgagacgtttttactggcgctcaagcggggcagcgggcctgcgggattatctgccatgcctgagcgcgcagattttgctgaaacagagctcatccgcccgctgctgggtgagacgcgcgcatcactggaagcctgggcgcagcagcatcatctgtgctggattgaagacgagagcaatcaggacgacagttacgaccgtaacttcctgcgcctgcgcgtcttaccgctgctgagtgagcgctgggcgcatttttccgaagcggcggccagaagtgccatgctgtgtgctgaacaggaaagcttgctggatgagttgctgagcgaggagctagatacgctgactaccgctgacggtgccctgaacattgcgccgttgaaggtgatgagccccgtgcgccgggctgctctgattcgtcgctggctggcttaccaccgtgcggttatgccgtcccgggcgatgctcaaccgtatctgggaggaagttgcacaggcgagggaagatgccgccccgtgtatacacctgaatggttatgacgtcaggcgctataaagggcaactctggtgggtaaaatctgtgccgtcgctggctgacgttgtgctcgactggccgtcgccggaaaaagcattaacgctaccgatgaatgccggtgtcgttgcgttaagccattcgggcaatgtgcgtctacctgagccggacgagaacgtcactatacgcttcagggccagcggcatgctgcatatcgtcgggcgtaacggcgggcgtaagctgaagaaaatctggcaggaacagaacgttccgccctggcgacgtgataccacgccgcttctgttttacggcgacacgctcatcgcggcggcaggggttttcatcactgaagaggggtgggctgaagcgggagttaattttgaatggaaagcgtaacgggcagcctggctgcccgttggttatcaggattcgctcaccacgacggtgccgatttccggatggctgaaactggcaattttgtcgaggcgtagctcacgcgttgcacctgcatcttccacaaccaggtattccacatttttacgggaaaccagatcgctggcctttgcctttagcacttcgccatcttttagctccagcgtcagtattaaatgatgctggcaggcgagttcgaggttgtcatagtcatcacaattgatgggttgataggtatcattcatcgacataatcgctcaccagtaaattcgccgcagcatacgctgctttttccctgaccgattcagaaaggctctcatcagaggccacttcatttagcacgttcaatacacagcccaacgcatctggaatgtaccccagatctccgctggcgatctccgcataccgtctgcgaatcaactcacaataattattcacatcacctcctgccagcgtactgacttactgtgagatatcattaagcctacgaagttaaactcggtttagcaaggtgactataccatactcatttaagcattatcagcgccttgataagaggaagccaccacctcgtaacagccttttgccgcggttttcgctacaatgtatgcctgattcgaaaggagttctctcatggcgctgaaagcgacaatttataaagctgtggtcaatgtggcggatcttgaccgtaaccagtttctggatgcgtcattgacgctggcgcgtcacccttctgaaacccaggagcgcatgatgctgcgcctgctggcgtggattaagtatgccgacgagcgtctgcaatttacccgtggtttaagcgcggaagatgaaccggaagcctggctgcgcaacgatcatctgggtatcgatttatggattgagcttggcctgccggatgaacgccggatcaaaaaggcctgcacccagtctgctgaagtggcgttgtttgcctacaaccagagagcggcggagatctggtggcaacaaaataaaaataaatgtgcgctgttcaaaaatcttaccgtctggtatctggatgatgaacagctggcgcagctgagtgcgttcgccagccggacgatggcgctacaggcgacgattcaggacggcgccatctggctttccgattctcagaataatctggaaattcatctcacagcctggcagcccgcatcatgattgtattgtcccgaaacgtcagcatccctgataacgagctggagatcaccgccatccgggcccagggagcagggggacagcacgttaacaaggcctcaacggctatccatttgcgctttgacattcgggcctccagcctgccagagtattataaagaaagcctgcttgccgccagccatcacctgatcaccagcgagggtgtgatggtgattaaagcgcaggagtatcgcagccaggagcttaaccgggaagcggcaatagcccggctggtcgcggtcatcaaagagctgacggctgtacaaaaaagtcgccgggcaacacgtccaacgcgggcatcgaaagaacgtcggttgtcatcgaaggcgcagaaatccactgtaaaatcactgcgtggcaaagtccgtcacccataatgtgacgaaagggataccctttttcataaggaaagtattgtgaaaaaagcattattatcagcgctggccgtgacaagcctgttcgcgctttttggctgtaataaccgttcagaaacgcaggtactacagccaacgcaaaatgaagaattaaagccgatgcagcaaagctggcgcggcgtattaccgtgtgcagattgcgagggcatcgaaacctctctgttcctgcaaaaagatggcacctgggtcatgaaccagcgttaccagggggcgaaagaaccgtcttcttttgcatcttacggaacatgggcgcgtacggctgagaagctggtattgacggataccacgggcgataaaaccttcttccgcgccaaaggcgaggggatggagatgctcgatcgcgaaggcaatccaattgaatcccagttcaactacacgttggccccggtgaaagcgaccctgccagccaccccaatggcgatgcgagggatgtatttctacatggcggatgcggcgatcttcactgactgtgcaaccgggaagaaagtcagcgtggcgaacaatgcccagctggagcgagactatgccgtcgcgcgcggcaacgacagtaagccagtgttgctgacggttgaagggcattttacgctggagccaaacccggatagcggcgagctggtgaaaacgctggtggcagataaagatgcgaagtttgctgcggggaaagactgcgaaagcaaataagatatagccattaaaaaaccccgcactggcggggttttttgtttcttaacctttgatggctttcaccaggtaatcaagaatatctcccgtcttgatcatctgtttttcgccgttgcgacggtatttgtattcaatctcgtcgctgtcgaggttacggtcgccaatgacgatggtgtgtggaataccgatcagttccatgtcagcaaacatcacgccaggacgctctttacggtcatccatcagcacgtcgatacctttcgcgctcagctcagcgtagagtttctcagccagctcctgcacgcggtaagacttgtgcatgttcattggcaggatcgccacctggaacggcgcgatgttatccggccagacgattccgcgttcgtcatagttctgctcgatagcggcagcaacaacgcgcgttacgccaatgccgtagcagcccatggtcagaacctggttacggccatcttcgccctgaacggcagcgttcattgcgcgcgagtacttatcgcccagctggaagatgtggcctacttcgataccgcgtttgatcatcagagtacccttgccgtccgggcttggatcgcctgcgaccacgttacggatgtcagccacttccggcgtcgccacgtcacgatcccagttgatgccgaagaagtgtttaccgtcgatgtttgcgcccgcagcgaagtcgctcatcgccgcaacggtgcggtcaatgaccaccggaacaggcatgttcaccggacccagagaaccaggaccagcattcaccacggcgcggatctctgcttccgttgcgaaggtcagcgggctggcaacctgcggcagcttctcggctttcacttcgttcagctcgtgatcgcctcgtaccagcagggcaaccagtggataagcgctaccttcagccgatttcaccagcagggttttcacggttttttcgatcggcagagtaaactgctcaaccagctcggcgatagttttcgcgtttggcgtatcaaccagcgtcatctcttgcgttgccgcgccgcgtggttcttttggtgccagcgcttctgcaaattcgatgttcgcggcgtaatcagaggagtcagagaagatcacatcgtcttcgccgctctgcgccagaacctggaattcatgggaggcgctaccgccgattgaaccggtatcagcctgtacagcacggaaatccagccccatgcgggagaagattttgctgtaggccgcgtacattttgtcgtaggtctcttgcagcgattcctgagaagtatggaaagagtaagcatctttcatcaggaactcgcgagaacgcatgacgccaaagcgtggacgcacttcgtcacggaacttagtctggatctggaagaagttcagcggcagctgtttgtaagagctcagctcgttacggatcaggtcggtgatcacttcttcatgcgttgggccgagaacgaatggacgatcgccacgatcggcaatacgcagcagttcaggaccgtactgctcccagcgaccgctctcctgccacagttcagagggctgaacgaccggcattaacacctcgatagcaccggcgttgttcatctcttcacgcacgatgttttcgacttttttcaggacgcgcacgccggtcggcagccaggtgtataacccggaggccagcttgcggatcatcccggcgcgcagcatcagctggtggctgatcacctcggcgtcggcaggtgtctccttcagagtggagagcagatattggctagtacgcatgttgttacggttccatttcgacgattggaacaggctgaaacaccagcctgacacaaaaaaagtggtttagtttaccagtgtggcaaagatgccaaaagagaggagaacaaaattacctgggttccagggcaaacacttcaaaacccgccgcagtcacgcgccagcgcacgttaaagtccagcagccagacggcgtacgtattcccggcttcctcttctttgcggtaggcgggacgggggtcctgggccagcacttcaacgataaagtcacgcaggcgaggataacgcttttccagctcgctgatttgcgtcgttatttcagacgtgaagtgaaccggcatatctgcctgcggtgcgtcctgagcatagcttgctcgggcatccggcagcgcttcggcgaagggcaggtaaggcttaatatctatgaccggcgtgccatcaaccaggtcaaggctacctaactccaggatcacctgatctttctgacaacgtatgcctttcagctcgaccagcgacatcccgatggggttgggacgaaaggttgagcgggtggcaaagacacccattctggcatttccgcccagacgaggcggacgcacggtaggacgccagccgccttccatggtctggtgaaatacaaagaccacccataaatggctgaacgcctcaagcccgcgcactgcatcggcctgattatacggcgcgacaagatgaagctcgccgccgccgttaatgaccagacccggctgacgtggaacggcgaacttttctttataaggggagcggataacgcctatctgctcgaactgaaatgaactcatttcgccgtaatgttaagcgcagaaccgatacataccgcctggcgatagcaaccaggtgtgccgctggtgacttcgcagctgtgcagcagcaccgcgttggctttcattttcgacgcgttgatttgcatacgcttgcgggctgtcggaatattgggtggggagtcctgattcgttgcctggcaggattcgccgctcacttcgcccagttcacggaatggcttaccgaccagctcgtcggctttggtaataatacgtaccggcgcagcgcgaggcgctttcggttttgctggctccgcttttggcggggttgcagtgctttgaacaggttcaacaggagatctgcttagcatagaacagccgctcagcatcagtgctaaaaaacagatcggtaaagcacgcataataattcctcagtggataatcaaaacgtcagatattgaagcagttgaccgcacaaatgacaagacgggcaaatgcccgtcttgatgatattacactgccgggagattaccagcctttaaccgcgccgccgttaaacaccttattggcttcctggtacacttcttcagactgatatgcctgtatgaatttcttcacattctccgcgtctttgttgtcttcgcgagtcacgatcaggttgacgtacggggaatctttatcttcaacgaagatgccatctttcgctggggtcaggccgatctggctggcgtaagtggtgttgatcacggccagggcgatctgcgcatcgtccagagaacgtggcagctgtggtgcttccagctcaacaattttcagatttttcgggttttcggttacgtccagaacggtcggtaacaagccaacgccttctttcagtttaatcaggcccactttctgtagcagaagcagggaacggccaaggttggttgggtcgttagggactgcaacctgtgaacccggctggagttcatccagagatttaattttcttggagtaaccggcaatcgggtaaacgaaggtgttaccgacagcaaccagtttatagccgcgatctttgatctgctgatccaggtacggtttatgctggaaggcgttagcgtcaatgtcgcctttgctcagcgcttcgttcggcagaacgtaatcgttgaaggtcaccagttcaacgtccaggccatatttctctttagcgattttctgcgcggcctcagcaacctgctgttctgcaccgacgataacgcctactttgatgtggtttggatctttttcgtcctgaccgcaacccaccagtgccagcgagccaatcagtgcgcctactgctgcgaaggtcttaaatttaaacgccatgttatatccttaactcgtcgagtttgtgttgtttgtaacgttatttatgcgtaacagcccggacgatacgatcgccagagaattgaattaagtaaaccagcacaaccagcaataccagaacggtattcattacggtagcgttatagccaatatagccgtactgatatccaatctggcctaaaccgccagcacctacggcgccgcccattgcggaataaccgaccagggtgataagcgtgatggttgctgcgttcaccagcccaggcagcgcctctggcagcagaactttgcgaacgatctgcattggcgtcgcacccatagcgcgggaagcttcgatcaggccggttgggatttccagcagggcgttttccaccatacgggcgataaacggtgccgcgccaacggtcagcgggacaatagctgcctgcaaaccaatcgacgtcccgacgatcacgcgcgtaaacggaatcatccacaccagcagaataatgaacggaatagaccggaaaatgttcaccagcgcagagagcgtgcgatacagcttcgcgttttcaataatttgacccgggcgcgtaacgtacagcagcacgccgaccggcagcccaatcacaaaaccaaagaagcccgatacgaaggtcattgccagcgtttcccaaacgccgcgaaccagtagccacatcatcggctcagacataacccagtacctctacttttacgtgatgttcttgcagccaggcaattgccgcctgggtttcttcctgtgtgccgtgcatttccgtcagcataatgccgaacttcacgccaccggcgtagtccatctgcgcgctaataatgttgttattcacgttaaagcgacgcgcggtttcggacagcagcggtgcgtcaacggactggcccgtgaactccatgcgcagcatcgggacgctgtcaggcgttgcgtctgtttttaaacgttccagataatcttccggaatatccagatgcagtgtggactgaatgaactgctgagccagcggcgttttcgggtgtgagaagacttcactcaccgtgtcctgctcaatcagctcaccgttgctgatgaccgccacgcagtcgcagatgcgtttcactacatccatttcatgcgtaataaggagaatcgtcaggcccaggcgacggttaatgtcttttaacagttccagaatagagcgcgtggtggccgggtctaacgcgctggtggcttcatcgcacagcagcaccttaggattgcttgccagcgcgcgggcaatggccacacgctgtttttgcccaccggacagatttgccgggtagctatcatgcttgtcgcccagaccaacaaggtcgagcagttcggtgacgcgacgcgtaacttcttctttcggcgtgttatccagctcaagcggcagggcaacgttgccgaacacggtgcgggatgccagcaggttaaagtgctggaaaatcatgccaatctggcgacgcgctttggtgagttctttttctgagagagcggtaagctcctggccgccaacttctacgctgccctgggttgggcgctcaagcaggttaacacaacggatcagcgtacttttacccgcacccgatgcgccaatgacgccataaatctgaccagcaggcacatgcaggctgacgttgttcagcgcctgaatggttcggttcccctgctggaacactttggtgatattggaaagtttaatcattagattatttttatcgtaagtaagttagccgtggcattttcttctgccagatacggggaatgaccgtaaacaaaatggatgttaaggcatccagacgtctaaatcaatccacctctgtgcgatgagcactttattgcgctgcgattcatgagatactagctgaacaagactttttcaggagcaaaccggtggcaaaatctgtacccgcaatttttctcgatcgtgacggcactattaatgtggatcacggttacgtccatgagattgatgagttcgagtttatcgagggcgtaatagatgccatgcgccagttgaaagagatgggctatgcgctggtggtggtaactaaccagtccggtatcgcccggggtaaattcaccgaagcgcaattcgagacgctgacggaatggatggactggtctctggccgatcgtggcgtcgatcttgatggcatctattattgtccgcatcacccgcagggaagtgtagaggcgtatcgtcagacctgtgattgccgtaagccacacccgggcatgtttatctctgcacaggaattcctgcacattgatatggccgcatcttatatggtgggcgataaactggaagatatgcaggcagcagcggcggcaggtgtaggtaccaaagtattagtgcgtaccggtaaaccggtcaccccagaagcagaaaatgcagccgactgggtgataactagtttggcagaactgccaaaagagattaaaaagcaccaaaaataggcgttttggcgaaaaggtgagcggttgaaataaaaatgcatttttccgcttgtcattcctcggcggccttctgaagtgacaagcactaaatacaaaaaactttccgttcgctcacttttcaaactcaacgcttatttatcccgcgcatcgtccgttaaacgcgcaatttcacgggcaaaactggcgacctgggcccagtcggtataaaccacttctttacgcgtatccgtttccccgcccgtcattttcatgatcaggcggatcataaagcggtcataccagcggtaacgcgggtaacgcagcgcgccagcaaagacagaacagatatcgggctgccatggcgaacttagcaaaaacttgcgcgtatagctgttggtctgtggcgtacgcttctccgctttacgggcaaccaggttgaccgagtaaaacgcgccaggcagttgagcgagctccgccgtatgctttttcacaaagcgatccagcgccggatggaaatggccgtaacgaattgaagcgccaatgaccacgcggtcgtaatcctgccaggcaatctgctctgtgcgattcaggttcaccacatcagaataaatgcccagctctttgagttcagaagccagatatgaagcaatctcacgcgtttgtccgtcacgcgttgagaaaagaattaacgttttcaccaaagtctccttactcacgccagaatgttggggtaaacagcaccagcagcgtaaagacctcaagacgcccaaacagcatattggcgattaagatccacttcgccaccgggttcatactggcgaagttatccgccacgacgcccagccccggccccaggttgtttaacgttgccaccacagaggcgaaggcagagaaatcatccacgcccgtggcgataatcgccagcatactgacaataaagaccagcgcataagcggagaagaatccccacaccgcttcgaggatgcgctccggcaacgcgcggttccccagcttaatactgtaaaccgcattcgggtggaccagacgtttcagctcacggttcccctgcttgaacagcagcagaatgcggatcaccttcagaccgccgcccgttgaccccgcgcaaccgccgataaacgcagagcacaacagcagcaccggcaggaacagtggccaacgcgcaatactgtccgtggtgaaaccagcggttgtcgccatcgataccacctggaagaaggcctggttcagggtcgtgaccgccgagttataaacatcgtggaaccacagtaccagggtacagataaccaccagggtcagctggacgccaataaacatccggaattccgggtcgcgccagtacaccttcaggctccttccgctaagcaacgagaagtgtagaccgtagttacagcctgagatcagcaaaaagatggcaatgatggtattgattgtcgggctgtcgaagtagccgacgctggcatcgtgggtggagaacccgccgatagcaatagtcgcaaagctgtgcccgatggcatcaaacgcaggcatcccggcaaaccacagcgccagcgcgcaggccaccgtcagcaggacatagataagccacagggtcttcgccgtctccgcaatacgcgggcgcatcttgttatctttcagcgggccgggcatctccgcccggtaaagctgcatccccccgacgcccagaatgggcaggatagccaccgccaggacgatgatccccataccgccgaaccactggagcatctgccggtaaaagagaatcgcatgcgggagcgaatccagccccacaagcgtggtggcgccggtggtcgttaatccggagaacgattcaaaaaacgcatccgtgacggtgagattcggttgttcggagaagataaacggcagcgcacccacgcttcccagtaccgtccagaacaggaccacaatcagaaacccctcccgggatttcagttcacctttctcacggcggtttggccaccacagcagggagccaatcgtcagcgcgacaaaaaaggtttgcgtaaatgcacgccccgcgccgtcccggtagatgagcgccaccagtccgggaatgatcattgtcccggagaaaagtatgaccagcaatccaacgattcgggtaatggcacgaaaatgcatctctgccgcttccttaggtattcaaaattgtgaggtggggattattcttcaatcggcagtaattgcaatgaaccgcgactaaaatcagcgagttttgctgaaaaagcagccagttccgcctgaggaagcgccacgcgtaattgcaccattgcctgataatcactgtgtgcgatgacaccgttaaactgtttaagcagtgcttcgatacccgatagctgggcgtaatcgcataacaaagtatattccgtaagtggcgttttgcgggttgttatcagcagattaagcgcttgctggacaccacctccgtaggctttaaccagccctccggtgcctaacaaaatgcccccgtagtagcggacaacaacggcggtgatttcacccacgccgctgcccattaactgggatagcatcggttttccggccgtacccgccggttcaccgtcgtcagaaaacccgagctgctgtgagtcgtctggcggtcctgcgacccacgccacacagtgatggcgggcatcggggtgctgcgcgcggacggactcgacgaacgccttcgccgcctccacgccgtcggtatgcgccagcagcgtgataaagcggcttttcttgatttcctcaacaaaggtgaccggctcggccggtatcagccagctttccatcaggccagcttcagatctcgcgtcatgttctcaatgctgttctcgtgaataaccacgttatcctcgatacgaatgccgccatacggcttcagcgcttcaattttctcccagttgaagtgcttgctgaattgcccttcgcgccacggcgccagcagggattcaataaagtagatgcccggctcgatggtcaataccatacgcggcgccagaacgcgggtgcagcgcagataaggatatttagacggtgccgccaggtgcgtaccggtatcatcctgcataaagcccgcgacgtcatgaacctgcaaacccagcgggtggccgataccgtgcggcataaatggcccggtcagatcgttctcaaccatcgcctcttcgctcatgtctttgacaatctgatgcttacgcagcagtttagcgatgcgctgatggaactggatgtgataatccacgtagctggttccggccttcatggtgccaatcagcgccagctgttcgtcgttcacgtctttgatcaattgcgcaaaatcggtgtccgcattcgccgcccaggtacgggtcaggtctgccgcataaccattgtactcagcccccgcgtccagcaggaagctgcgcatctcagccggaacctgatgatccagtttggtgtagtgcagaaccgaggcatgttcattcagcgccacgatgttgctgtacggcacgtcggtatcgcggtggccggtcgccgtcaggtaggcctgattgatatcgaactcgctcataccggactggaacgcttcatgcgccgcacggtggccattcaccgccgttttttgcgcttcacgcatgcagtaaagttcgtagtcggtcttgtaggcgcgatagtagtgcagataatccagcacgcctttcgggttgagtttatctgccggaatatccagacccagcgcacgctcaggaaccggaccaatgtagccgatgttgccgcgcgccgctggcagctggctgccaatgccgtctgcttttggcagcgcaatcacgtcaatttcttcggtccagaatgaggtcggcagcggctccacgttgtgccagtaatcgaccggcaggtagaaccacagtttcggcttgttcacgccatccaccagcagccagcaatttggaacctgcgtgacaggcacccaggctttaaactgcgggttaaccttgaagggataagcatggtcatcaagaaaagtattcatcagctcgccggagtggatcagcagggcatccagcttgaagcgggccagtacatcgcgggtacgttcctgtagggtaacgatatgatttttataaagcgaagccagtgagtccatcattcttcctttcgttttattgacctcaagtcatcgcatcttagcacacctcactgcggctgcgtgatttccaccgaccgtgatcagcgcagcaatttcttaatgactaatttgcattttattaacataaattccacactccgtttcatctggtatgaccagatccaattgctggattcaggagaccgacatgctctacaaaggcgacaccctgtacgtagactggctggaagatggcattgccgaactggtgttcgatgcccccggctcagtgaacaagcttgataccgcgacggtggccagtcttggccaggcgctggatgtacttgaaaagcaatcagatttgaaagggctgctgctgcgctccaacaaagcggcctttatcgttggcgcggatatcaccgaattcctgtcgctgttcctggtgcccgaagaacagctgagccagtggctgcactttgccaacagcgtttttaatcgtctggaagatctgcctgtcccgaccctttccgccgttaacggctacgcgctgggcggtggctgcgagtgcgtgctggcgaccgactaccgtctggcgacgccggacctgcgcatcggcctgccggaaaccaagctgggcatcatgccgggctttggcggttccgtgcgtatgccgcgcatgctgggtgccgacagcgcgctggagatcattgccgcgggtaaagatgtcggcgcagaacaggcgcagaaaatcggcctggtggacggcgtggttaagcctgaaaaactgattgagggtgctatcgccatcctccgtcaggcgattaacggcgatctcgactggaaagccaaacgtcagccaaagctggagccattaaagctcagcaaaattgaagccaccatgagcttcaccatcgccaaaggcatggtgatgcagacggcgggtaaacactacccggcgccgatcacggcggtgaaaaccattgaagcggcagcccgtctgggccgtgatgacgctctgaagcttgaaaaccagagctttgtcccgctggcgcacaccaacgaagcccgcgcgctggttggtatcttccttaacgatcagttcgtgaaaggcaaagccaaacaactcaccaaaaacgttgaaacgccaaaacacgcggcggtactcggcgcgggcattatggggggcggcatcgcctaccagtctgcctggaaaggcgtgccggtggtgatgaaggacatcaacgagaaatccctgacgctgggcatgaccgaagcggccaagctgctgaataaacagcttgagcgcggcaaaattgatggtctgaagcttgcaggcgtgatctccaccatccagccagtgctggaatacagcggtttcgaccgtgtggacgtggtggttgaagcggtcgtcgagaacccgaaagtgaaaaaagcggtgctggccgaaaccgaagacaaggtgcgtccggaaaccgtgctggcctctaacacctccaccattcctatcagcgaactggcgagcgtgctgaagcgtccggaaaacttctgcgggatgcacttctttaacccggtgcaccgcatgccgctggtcgaagtgatccgaggggaaaaaacctccgacgaaaccatcgccaaagtggtggcgtgggcgagcaagatgggcaaaacgccgatcgtggttaacgactgcccgggcttcttcgttaaccgcgtgctgttcccgtacttcgccggtttcagccagctgctgcgcgacggcgcagacttccgcaaaatcgacaaagtgatggaaaaacagttcggctggccgatgggcccggcgtatctgctggacgttgtcggcatcgacactgcccatcacgcgcaggcggtgatggcggcgggcttcccgcagcgcatgcagaaagattatcgcgacgcgattgacgccctgttcgacgccaaccgctttggtcagaaaaacggtctgggcttctggcgctataaagaagacagcaaaggcaaaccgaaaaaagaagaagatccggcggtggatggcctgctggccgacgtcagtcagccgaaacgcgactttaccgacgacgaaattatcgcccgcatgatgattccgatgatcaacgaagtggtgcgttgcctggaagaaggcattatcgccagcccggcagaagcggatatggcgctggtgtatggcctcggcttccctccgttccacggcggcgcgttccgctggctggatacgctcggcagcgcccgctatctcgatatggctcagcagtaccagcacctcggcccgctttatgaggtgccggaagggctgcgtaacaaagcgcgccataacgaaccctactatccagcagttgagccagcccgtccggttggcgcactgaaaacggcttaaggagtcacaatggaaaaggttgtcattgttgatgcgattcgcaccccgatgggccgttcaaaaggcggtgcgttccgtaacgtgcgcgcggaagacctctccgcgcacctgatgcgtagcctgctggcgcgtaacccggcgctggacccagctgcgctggacgatatttactggggctgcgtccagcagacgctggagcagggcttcaacatcgcccgtaacgcgtccctgctggcggagatcccgcattcggttccggccgtcaccgtcaaccgtctttgcggttcgtcgatgcaggcgctgcacgacgcggcacggatgatcatgaccggcgatgcgcaggcctgtctggtgggcggcgtggagcacatgggccacgtgccgatgagccacggggtcgatttccatcctggcatgagccgcaacgtggcgaaagccgccggtatgatgggcctgaccgccgagatgctctcccgtctgcacggcatcagccgtgagatgcaggatgcgtttgccgcgcgctcgcatgcccgcgcctgggccgccacgcagtctggtgcctttaagaatgagatcatcccaaccggcggtcacgacgcagacggcgtactgaagcagttcagctacgacgaagttatccgcccggaaaccacggtcgaagcgctttctaccctgcgtccggcgtttgatccggtcaccggtacggtaacggcgggcacctcgtctgccctgtccgacggtgccgccgcgatgctggtgatgagcgagagccgcgcccgcgaattaggcctgacgccacgcgcccgcgtgcgttcgatggcagtcgtgggctgcgatccttccatcatgggttacggtccggttccggcgtcaaaactggcgctgaaaaaagcggggctgagcgcaagtgatatcgacctctttgagatgaacgaagcgttcgccgcgcagatcctgccgtgcattaaagatctggggctgatggatcagatcgacgagaagattaacctcaacggcggcgcgatcgccctcggtcacccgctgggctgctctggggcgcgtatcagtaccacgctgattaacctgatggaacgcaaagatgcccagttcggactggcaacgatgtgtattgggttgggtcagggtatcgcgacggtgtttgagagggtgtaaataaggaaaagtatctcaaagtaacgtaggcccgataagcatcgcgccatcgggcttttgccgggaggcgctacgctttcccggcctacgaagagaaaaagtttagttgccgttcttcccgcctgtcaggggcgggttttttacgttattgcagcagcgaaatatccgccacgcgcaggaacagctcacgcagtttctcaagcatcgagagacggttaatccgcagctctttatcttccacgttcaccatcaccttctcgaagaaggcgtcgatgacgtcacgcagctccgccagctccaccagtgcttcctggtagcgaccttccgcgaaatacggctccagcttgtcgcgcagcaccacaacctgcatcgccagagaaatctcttccggctctttcagggttgcagcgttgacgcgctcgttcagcgtttcgtcggatttcgcgaggatgttggatacacgcttgttggccgcggccagcgcagacgccgcttccagcgtacggaagtgggataccgctttcatacgcgcatcgaaatctgccggacgggtcggacgacgcgccagcaccgcctgaatggtatcaacggagtaaccttcgtcctgataccacgcgcggaaacgaccgagcataaagtcgataacatcatccacaaccttcgcgttggtcagcttatcgccgtacagacgtaccgcttcttcggtcagcgtttgcagatcgaggttgaggttcttctctacgatgattcgcagcacgcccagcgcagcacgacgcagcgcaaacgggtctttatcgcctttcggatgctgaccgataccgaagatacccgccagggtgtccatcttatcggcaatcgccacggcgcaggcaaccgggttagacggcagatcgtcaccggcaaagcgcggctgatactgctcgttcagggctaccgccacgtcttccgcttcgccatcgtgacgcgcatagtgcatacccatcacgccctgggtgtcggtaaattcgaacaccatgttggtcatcaggtcgcacttggagagcaggcccgcacgggtagcgtggttaacgtcggcgccaatttcacgggcaatccagccggacagctccgcgatacggtcggtcttgtcgcgcagcgtacccagctgctgctggaacagtacggtttgcagacgcggcaggttatcttccagacgttttttacggtcggtattgaagaagaactcggcatccgccagacgcggacgcaccactttctcgttaccggagataatctggctcggatctttcgattcaatgttcgccacgaagatgaagtttggcagcagcttgccgtcgttggcgtaaaccgggaagtacttctggtcacccttcatggtgtaaaccagcgcttctgccggaacggccaggaatttctcttcgaatttcgcggtcagtacaaccggccattcgaccagcgaagtcacctcttccagcaggctgtcgctcagatcggcattaccgccaattttgcgcgccgcgtcttctgcgtccgctttgattttggctttacgctgttcgtagtcagcaatgaccttgccgcgctccagcaggatctgcgggtactggtcagcattgtcgatagtgaactccgactcgcccataaagcgatggccgcggatcacgcgatcggacgccacgcccagaatggtcgccgggataacggtatcgcccagcagcagggtcacggtgtgaaccggacgcacaaagtgtacgtcggacgcgccccagcgcatcagcttaggaatcggcaattttgccagcgaggtcgcgatcatgtcaggcagcagcgcttcggcgctttcgcctttcacatgggcacggtacagcagccattcacctttgtcggtggtcagacgctcagcctgatcaacagtgatgccgcagccgcgcgcccagccttctgccgctttgctcggcttgccttccgcgtcgaacgcctgagcaatggccgggccacgtttttcaacttcgcgatccggctgggacgctgccaggtttgccactttcagcgccagacgacgcggcgcagcaaaccactcaattttaccgtgcgccaggccagcgttatccagctcagcagtgacgttcgcagcgaaagattcagccaggctgcgcagggcttttggtggcagctcttcagtgccgatttccaccaggaaagttttctcagacatggccgcctcttatttgtttcggttgcacatcgggaagccaagggcttcacgggacgcgtagtaagcttctgcaacggctttggtcagggtacgaatacgcagaatgtagcgctgacgttcagtcacggagatcgctttgcgggcatccagcaggttgaagctgtgggcagccttcagaatacgctcgtaggcaggcagcggcagcggagtctccagcgccagcagctgctgggcttctttctcgtactgctcgaagcaggtgaacaggaagtccacgtccgcgtattcgaagttataggtggattgctccacttcgttctgatggaacacgtcgccgtaggtggttttacccagcgggccgtcgctccagaccaggtcgtaaacgctgtctacgccctgaatgtacatggccagacgttccagaccataggtgatttcgccggtaatcggtttacattccagaccgccaacctgctggaagtaagtgaactgggtcacttccatgccgttcagccacacttcccaacccagaccccaggcacccagcgttgggttttcccagttatcttccacgaaacgaatgtcgtgaatggttggatccatacccagctctttcagtgacccgaggtacagttcctgaatgttgtcgggtgatggcttaatcaccacctggaactgatagtagtgctgcaaacggttcgggttttcgccgtaacggccatcggtcggacgacgggatggctgcacataggcggtcgccattggctctggccctaacgcgcgcaggctggtcatcgggtgtgaggtgcctgcgccaacttccatgtccaaaggttgaacaatggtgcagccctgacgagcccagtaatcctgtaaggtcaggatcaggccctggaaggtcttggtatcaaacttttgcatagtatttcgtgctggatacgtgtggttttaaatggaagggatcagtatacccgctggctgcaagatatacagtacgaaacggggttgtttagggaaaattggggaataagccctacagccagaacctgcgaaggctctggttgctgcttatacgagcaatttaacgcattgagagatgtaaaaactggccgtctgcatcaaaagagcagacaaagccctctttacgcgccgtatagcctttcagttcatagctgccctgaaagcgctcgaagccgtttatatgaattttctgtgcttcggaattatagcggtgagccgcctgatccctgcacagctgttccatattcagagaacgctccgggctcattttcccctgctgagctttttggacaggtatctcctcagaagcactgcatcctgttaataagagcagcagaaagagtgacaccccacgcttcatcatcatttttattaccgccctggtcagtggctgttatttttagtagcaacacgtttatagattaaagtccgtcattctgcgaatctcgccagctccctacaagttagcctggctaaactcagaattttccaagggaaaagttttacacaatcgcagtcacactttttttatcaggaatacagaggaactgatgcagtcaaaaattaactggattgataacctgcggggaatagcctgtctgatggtggtgatgatccacacaacgacctggtatgtcacgaacgcgcacagtatcagccctgttaactgggatgtcgccaatattctgaactcggcctcccgcgtgagcgtcccgctgttctttatgatttccggttttctcttttttggcgagcgtagcgcgcagccgagacatttcatccgtattgtctcctgtctgctgttttacagcgccttttcgctgctctatatcatcctgttcacttcaattaacgctgaacgttccctgctcaatttgttgcaaaaaccggtgttctatcatctgtggtttttcttcgcgataatcgttatctatctggtgtcaccgttaattcaggtaaaaaacgtcagcggtaaaatgctgctggccttgatggtaataatcgggatcgtggccaacccgaataccgtttcacagaaaattgatggctttgaatggctgcccgttaacctttatatcaccggggatacgttttattacgtgctgtacggcatgctggggcgcgccattggcatgatggagacgcaaaagcgaggaataaactggctatgcgcggccgcgtttctcgtcggtgtgtttattatctctcgcgggacgctgcatgagctgcaatggcgcggcaactttgccgatacctggtatctctactgcgggccgatggtctttatctgcgcgatctctctgctgacgctggttaaaaacaccctgaatgcccgcccgcttccggtgctggggtttatctctcgccactcgctgggcatttacggttttcacgcgctggtgatccacgccctgcgcacccgcggcgttgagcttaaaagctggccggtgctggatattgtctggatatttaccgttacgctggttgtcagcctgctgctgtcaatgttgctgcaaagaatcgatacgcgcaggtttgtaagctagcccggttgaaggctggtaggccgggtaagcgttagcgccacccggctcctgtttatgacattagcggcaaaagctgctgatagattttgcggaacacgtctcgtctttcagcatagcgagcatgatttttcgcatcaggacgatgctgccgttcaagcggcagctggggcaaaagctggtgcagtggtttatccgggttcagcgcaatttgcgccagccgtgccgcaccgagcgccgggccgacatcgcctcccgtacgatagtccagctgcaacccgctgatatcggaaagcatttgccgccagtagctgcttcgtgcaccgccgccaattaacgtaatgctggatggcgtcagtccacagtcatgcacgacatccattccgtccgccagagcatagccaacgccttcaagcaccgcgcgcgcaagctctgccgggccgtgctgatgggtaagaccgaagaacacccctttcgcttccgggttgttatgcggcgtccgctcgccggaaaggtacggtaaaaaccagaccgcaccggcattatcatctgcctgctgtgccgctgttataagcgccgggacgtccgccattccggttagctttgccgcccagtcaaggcaggaagccgcgctcagcatcaccgacatcaaatgccatttacccggcaacgcgtggcagaagctgtgtacggcgcttcccgggttgctacgatacccgtcactgacggcaaaatagacgccggaagtgccgagcgagagcatggcctgccctgcctcgaccatccccacgccgaccgcacccgccgcattatcgccgccgccggcgacgacaggtacggctggcatgttccagcgttcagcaacagaaggctgcaaagcccccgtgatttcactgccttcaaacagcgcaggcatatggtcgcgcgtcagctggcaggcatccagcatcgcctcgctccagtcccttttcgccacgtcgagccacatcgtgcccgcggcgtcagacatgtcgctggcaaaatcccctgtcatgcgaaaacgcaggtagtctttcggcaacagaaccttcgccacctgacgaaaaatctcaggctcatggcgctgcacccacaggagttttggcgcggtaaaaccgggcatcatcaggttgcccgtaatttcgcgggacgcaggcacacgctcctcaaggatcgcgcactcttccgcacagcggccatcgttccagagaatagccgggcgcagaacgcgatgctgactatccagcaacgttgcgccatgcatttgcccggcaatgcccagtgccttcacgtcgcgcaggctgtgctgctcgcctaaggctttcatcgcacggtccgtcgcctgccaccactgctccggatcttgttccgaccaaagcggatacggacgtgaaacctgcaacttttcagtgtgcgtggctaatacatcgccctgctcgcttaacaggatggctttcacccccgacgtgccaagatcgatcccgatatacatgtggtggctcctttgacgaaaatgcccggtggcgctgcgcttaccgggcctggatgctgttatttatcgaacaggtagtgattgaccaggttttccagcagctcctgatggccactctgatgctgcggcgcaagctgatgctgttcagcgtacttcgcgatctccgcaagcgataactgacctttcaaaatttgctggcccagctcactgttccagccgctgtagcgcttcgccacgcgcttatccagctcaccgtcttcaatcatacgggccgccactttcagcgccagcgccatggtgtccatcgcgccaatatgcccgtagaacagatcgtatttgtcggtgctctggcgacgcactttggcgtcgaagttcaggccgccggtggtgaaaccgcccgctttgatgatctcgtacatcaccagcgcattctcttccacgctgttcgggaactggtcggtatcccagcccagctgtggatcaccacggttagcatcgacagagccgaagatgcccagcgcaatcgcagaggcaatttcgtgatggaacgagtggcccgccagggtagcgtggttagcctcaatattcactttgatctctttttccagaccaaactgcttcaggaagccatacacggtggcgacatcataatcatactgatgcttggttggctcctgtggttttggctcaatcagcagcgtgccgcggaaaccgattttgtgtttgtggtccacaaccatctgcataaagcgaccaatctgctcacgctcctgacgcaggtcggtattcagcagcgtttcatagccttcacgaccgccccagagtacatagttctcaccgcccagctgatgcgtggcgttcatcgcggtcacgacctgggttgccgcccagctgaagacttccgggtccgggttggttgccgcacccgcgccatagcgaggattggtaaagcagttagccgtaccccagagcagcttgacgccgctttgctgctgtttttcagccagtacgtcgaccatctgcgcgaaattgttcagatactctttcagcgatgccccttccggcgacacgtccacatcgtggaaacagtagtacggcacgttcagcttatggaagaactcgaacgcgacgtcggctttacgcttcgccagctcaatggcctcgcccggctgttgccatggacggtcaaaagagcccacgccgaacatatcggcaccgttccagcagaaggtgtgccagtagcaggcggcaaagcgcaagtgatcttccatgcgcttacccagcaccagctcatccgggttgtagtgacgaaatgctaaaggattggtcgttttcgtgccttcgaaacgaacgcgatcgagttggtcgaaataagcttgcatattgagctccataatcagggtatgcggcgtggtcttgcttctggagtaatagtgaatagacattggaggttgctcaattacgttatttcacactgctattgagataatgcgcaattgtgcgctggctcgcaaaataatgtgcagacaaactatttttcggcgcgcattccagaatcaaatgtaattaataggttacgctttttaaaatccgatcgcggtcataaattcagaaataaaccaaatatcgtaatgagaagataaaaatctgtaattgccagcaggcctttccacgttaaaaatttgctgcgtctcagcagtgaacgtttcttttatctcagctacacatacccctacaaaaaggcctaataattatgaagataaagaacctgaccctaacgctctgcactactatcctgcttgcaagctttgccggacatgccaaagaggtcaaaatcggcatggcgattgatgacttacgcctggagcgctggcaaaaagatcgcgatatctttgttaaaaaagcggaatctctcggcgcggaggtgttcgttcagtccgctaacggcaacgaagagacgcaaatgtcgcaaatcgagaatatgatcaaccgtggcgtcgatgtgctggtcattatcccgtataacggccaggtattaagcaacgtggtgaaagaagcgaaacaggaagggataaaagtcctggcttatgaccgcatgattaataatgccgatattgattattatatttcgttcgacaatgaaaaggtgggtgaattacaggctaaaagcctggtcgcaaaagtgcctcaggggaattatttcctgatgggcggctcgcctgtggataacaacgccaaactgttccgccagggacaaatgaaagtgctgaagccgtatatcgacgagggcaaaattaaagtcgtcggcgaccagtgggctgacggctggttaccggaaaacgcgctgaaaattatggaaaacgcgttgaccgcaaataacaacaaaatcgatgcggtggtggcctctaacgatgccactgcgggtggcgccattcaggcgctgagcgcgcagggactggccgggaaagtcgctatttccggacaggacgccgaccttgcgggtgtaaaacgcatcatcgcgggtacccagaccatgacggtgtataagcccattaccgagcttgccaatacggccgccgaaattgccgttgagctgggcaatggccagcaacctaaagcagacgcgacgttaaataacggcctgaaagacgtacctgctcgcctgcttacccctatcgaagtcaacaaagagaatattgacgccaccgtggtgaaagacggtttccataagaagagtgaactgtaatccagcgcagcccctgcccggcaggggcgcattgacctgccctgttcatctgttgggctatgcggagcagttatgtcttatttacttgaaatgaaaagcatcaccaaagccttcggggcggtgaaagcagtcgataacgtaagcctgcggctgaatcccggcgaagtgatgtcgctgtgcggcgaaaatggctcgggaaaatccacgctgatgaaagtgttgtgcgggatctacccgcacggcagctacgagggcgaaatcgtttttgccggtgaggtgctccaggccacgcacattcgcgacaccgaacgtaaaggcatcgctatcattcaccaggagctggcgctggtgaagcaccttaccgtgctggaaaatatctttctcggtgccgaactctcacgccacggcgtactggattacgacaccatgacgctgcgctgcgaaaaactgctggctcaggtgagcctggctatctcaccggatacgcgcgtgggcgacttaggtttaggccagcagcagctggtggagatcgccaaggcgctgaacaaacaggtgcgcctgctgatcctcgacgaaccaaccgcctcactcaccgaacaggaaaccgccgtactgctcaatatcatccgcgatctgcaaaaccacggtatcgcctgcatctatatttcgcacaagctcaatgaggtgaaagccatttccgacaccatctgcgtcatccgcgacgggcagcatatcggcacgcgtgaagcagaaggcatgagcgaggatgacatcatcaccatgatggtgggtcgcgaactcaccgcgctgtatcccaacgaaccgcacaccatcggcgaagagctcctgcgcgtggaaaacctgacggcgtggcatcccgttaaccgccatatcaagcgcgtggataacctctccttctcgctgcaccgcggcgaaattctcggcattgcgggtttagtgggtgcgggaagaaccgaggccgtgcagtgtctctttggggtctggccggggcgctgggaaggcaaaatttatatcgacggtcagccggtaaaaatcgacaactgccagcaggctattgctaagggcattgccatggtgccagaagaccgcaaaaaagacggcatcgtgccggtaatggcggtgggaaaaaatatcacgctggcggcgctcagccagttttccggcgcgctgagcagcctggatgatgccgcagaacagcagtgtattctccagtcgcttgcccggcttaaggtgaaaacctcctcgccggagctggcgataggacgcttgagcggcggcaaccagcagaaagcgattctggcgcgctgcctgctgcttaatccgcgcattttaattcttgacgaacccacccgcgggatcgatatcggcgcgaagtatgaaatctacaagttgatcaaccagcttgtacagcaagggattgccgtcattgttatctcgtccgaattgcctgaagtgctggggctgagcgaccgcgtgctggtcatgcatgaagggaaactcaaagccaacctgaacaaccagaacctgacgcaagagcaggtgatggaagctgccttaaggagcgaacgccatgtcgaaaagcaacccgtctgatattaaagtcgctgttccgacgcccggtgcgttcgcaggacttaaatcgctgaatctgcaagtttttgtaatgattgccgccattatcgtgatcatgttgttctttacctggatgaccgatggctcctatttgagcgcacgtaacgtctctaacctgctgcgtcagaccgccatcaccgggatcctggcggtggggatggtctttgtgattatctcagcggaaattgacctgtcggtagggtcgatgatgggtctgctcggcggcgtggcggcaatttttgacgtctggctcggctggccgctgccgctgacgattgcggtcacgctggtgctgggtctgctgctgggggcgtggaatggctggtgggtggcctaccgtaaagtcccgtcgtttatcgtcaccttagcggggatgctggccttccgcggcattctgattgggatcaccaacggcaccaccgtctccccgaccagcgcctcgatgtcccagattggccaaagctacctctctgatggcgtcggttttacgatcggcgtggttgggctgatggcgtttgtcgcgtggcaatggcgaggacgcatgcgtcgccaggcgctggggctggcctcgcccgcctcaacctcggttgtcggccgtcaggcgcttactgcggtgattgtgctaggggccatctggctgttaaacgattatcgcggcgtcccaacgcccgttctgctgctggcgctgttgctgttaggtggaatgtttatggccacacgtaccgcattcggtcgccgtatttatgccatcggcggcaatctggaagccgcgcgtttatccggcattaacgtagagcgcaccaaactcgccgtctttgccatcaacggcctgatggtggccatcgcggggctgatcctcagttcgcgactgggggcgggctccccctctgccggtaatattgccgagctggacgccatcgccgcctgcgtgattggcgggaccagcctcgccgggggtattggcagcgtggcgggtgcggtgatgggcgcatttattatggcttcgctggataacgggatgagtatgatggacgtgccgacgttttggcagtatatcgtcaagggtgccattcttttgctggcagtctggatggactctgccaccaagcggcgcgcctgataacagtatcgtgactaatttgggatatgagccatgtttgaaaagcgtcaccgcattacgttgttattcaatgccaacaaagcctatgaccggcaggtggttgaaggggttggcgaatatttgcaggcgtcgcaatccgaatgggatattttcatcgaagaagatttccgtacccgtctggagaacatcaaagactggctgggagacggggtcatcgctgactttgacgaccccgtgattgaacagttgctgagtggcgtcgacgtgcctatcgtgggcgttggcggctcttaccatacaccagaacattacccccccgttcactacatcgccacggataaccatgctctggtcgagaccgccttcctccatttaaaggagaaaggcgtacatcgttttgcgttttacggattgcccgccaccagcggaaagcgctgggcgatggagcgtgaatatgccttctgccagctggttgcccaggagaagtatcgcggcgtcgtttatcaggggctggaaaccgcgccagaaaactggcagcacgcacagaatcgcctggctgactggctgcaaacgctgccgccccagacagggattatcgccgtgacggacgcccgcgcccgccacgtattacaggtatgcgaacatttgcatattccggtgcctgaaaagctgtgcgtgattggtattgataacgaagagcttacgcgctatctgtcgcgcgtggcgctctcatccgtggctcagggtacccgtcagatgggctatcaggccgcaaagctgctgcacagactgttagacaacgaatccctgccgctccagcgtctgctggttccgcccgttcgcgtggtcgaacgtcgctcaactgactaccgctccttaaacgatccggccgtgattcaggcgatgcactacattcgcaatcatgcctgcaaagggattaaggtcgatcaggtgctcgattcggtcggcatttcacgttcgaatctggagaagcggttcaaagaggaagtcggtgagacgattcacgccgtgatccatgcggaaaagctggagaaagcgcgcagtctgctgatctccacctcgctgtcgatcaacgagatttcacagatgtgcggctatccgtcgcttcagtatttctattcggtgttcagaaaagagtatgacaccacgccgaaggagtaccgggaacggtacagtgaagtcctgctctagaaaaaagaacgccttccagtggaaggcgtttttcattacatatgtgcggcaatcagtcgctggttatcctggtacatggagaacaggtaattgttataacgctgtccctgagtggaataacctttcagcttgtggatcatcgccgtagccgttacttcctgatccgccttacgcagctgagcgcgtgacttacggaacgaggagtaggccggatgggtgttcaggttcaccacataggcattcacggaatctttcaccgattcaaactgtgaatagcctttcaccttgccgggtgcattagtacaacgaccttttgcgcatttcatgccaaacagattgttgttgttgcgcgccagcttcgaggtgccccaaccgctttcggcggcggccattgtcgcgaccatactgcctggaataatgtccacacgctctaacagagtgttccacggcacacgacgcgtgttcccgctccacttcactttatagcgtttggcgatgtctttcaggcgagtgcgctcagacggcgaccagcggctatcgtactgtttggagatcagccagttacgatccgcagtaatcgcggcattttgacttttaatgtaaggcattaccgtccggagaaacgcttttttccttggtgtcccggaagggtattttcgcaaatcaggaagtgaactactctttgcactattgcgagaatactcttgtttactgctaaccttactgcttgtcgtctttattacgtgggctttcttactcgttgtatccgcgtgcgtctttgcaagcacctcacctgaaaatgccatggtgagtaacatgagtatcgcggccccatatcgtcgaatgggagtcgatatcattaggtctcctggtcggatataaacattccaacaccttattttcttcaaaaatttgagagcggaatctcaaatcataccaaaaatagtcctcaagagcacgtatacaaatagtccaattccgaaactatgtcatccggaacatgctcattaaatcaccagcactggaaaaatgtgcgcgatatcgcagataactgcctaattttgcgcgggatcactcatcccttcgcgtcctcctggcagaaagcctcagaggaggagtttttcccctgagccgagtggcacactggtcaaaaatgccgcgacaggaaaatggaatgaaacgcactgcattagctgttctgatgttacccgcattcgcgcatgccgactggtcatcgccgggatttaacgcgtttagcgctgaaggtaccggcgtctttaccagccaggcaacacttgcgaagggtacccgcccgctgacgttgagtcttgataacgcgtgctggcagccgacaggtgccattaaactcaacgagatgctgtcgctcaaaccctgcgaagggaccccaccgcagtggcggttattccgtgacggcgtttatcagatgcgtattgatacgcgctcgggaacgccgacgctgatgttgacggtacaaagtgcggcgccacagcctgtcgcaaacgttacccgccagtgcccgaagtgggacggcaaaccgctcacgatcgatgtcgttaacacctttccggaaggcacggtggtgcgtgatttttacagcaaacagaccgcgaccgttcaaaacggcaaagtaattcttcagccagccgccaacagcaatggcctgctgctgcttgagcgcgccgagacggacaaacccgcgccattcagctggcaaaacgccaccgtctatttcgtgctgaccgatcgcttcgtaaatggcgaccccaccaacgacaacagctatggccgccataaagacggtatgcaggagattggtactttccacggcggcgatctgaaagggcttaccagcaaactggattaccttcagcaactgggcgtgaatgcgctctggataagctcaccgctggagcaaatccacggctgggttggcggcggcaccaaaggggatttcccccactacgcctatcacggctattacactcaggactggacgaaactcgacgccaacatgggcagcgaagatgatttacgccagcttgtcgacgacgcgcacaggcgcggtatccgcgtcctgtttgacattgtcatgaaccacgcgggttatgcgacgcttgcagatatgcaggagtatcagtttggcgcgctctatttgcagggcgatgagctgaaaaaaaccctcggcgagcgctggactgactggaagccaggcgccggtcaaagctggcacagcttcaacgattacatcaacttcagtgacaaagccgcatgggaaaaatggtggggtaaaaaatggatccgtaccgatatcggtgattatgacaacccgggctttgacgatctgaccatgtcgctggccttcctgccggatctgaaaacggaatctaagatcccgtcaggtttgccgaacttttatcaacacaagcccgacaccaacgcgaaagtgatgacgaatttcacgccgcgagattacctgacccactggctcagccagtgggtacgtgactacggcatcgacggcttccgggtcgataccgctaagcacgttgagcctgaagcctggcagcaactgaaaaaccaggccagccaggcgctggccgcgtggaaagccgccaacccggacaaaaaactcgacaatgcgccattctggatgaccggtgaatcctggggccacggcgtgatgcagagcgattattaccgccacggcttcgatgcgatgatcaactttgactatcaggagcaggcggcgaaagcggtggactgtctggccgatatggatttgacctggcagcaaatggcagaaaagctgcaaagttttaatgtgctgagctatctctcctcccatgatacgcgtctgttccgtgaagggggccagcgcgccgctgagttactgctgctggcaccgggaagcgtccagatctattacggcgatgaatcagagcgtccattcggcccgacgggctccgatccgctacagggaacccgttcggatatgaactggcaggacgtcacgggtaaacaggcgttaactgtcgcccactggcagcttctggggcagttccgcgcccgtcatccggcggtgggtgaaggcaagcaaacaacgctgtcaatgaaagagggctacggctttgtgcgcgagcacaagggcgataaggtgatggtggtgtgggcgggtaatcaatagaccccctcaccccggccctctcccacagggagagggccggggtgaggggcattcaccagaacaattcaccacacaaatacaaacctaccacataaaacaacaaatccgaccacattcgccgatttgcaccaacacggtgctggcgttatggttactgcctttcatattaagcccgacagatcacctgctatgacgttttcactattcggcgacaaatttacccgccattcaggcattacccgcctgatggaggacctcaacgacgggctgcgcaccccaggcgctatcatgcttggcggcggaaacccggctcaaattccggagatgaacacctacttccagacgctgctggcagagatgctggaaaacggtaaagcaaccgatgcgctatgtaattacgacggccctcagggtaaaacagaactactgacgcttctggcggcaatgctgcgggaagcgctgggttgggatatcgaaccacagaatattgcactgacaaacggcagtcagagcgcgtttttctacttattcaatctgttcgccggacgccgcgccgacggcaccacgaaaaaagtgctgttcccgctggcaccggagtatatcggctatgccgatgccggcctcgaagaagacctgtttgtttccgcacgtccgaatatcgagttgctgccagagggccagttcaaatatcacgtcgattttgaacatctgcatatcggtgaagagacgggcatgatctgcgtatcacgtcccaccaacccgacgggcaacgtgatcaccgacgacgagctgatgaagttggatgcgctggcgaatcagcacggcatcccgctggtgatcgataacgcctatggcgtaccgttcccggggatcatcttcagcgaagcgcgtccgctatggaacccgaatatcatcctctgcatgagcctctccaagctgggcctgccgggcagtcgttgcggcattatcattgctaacgagaaaatcatcaccgccattaccaacatgaacggcattatcagcctttcccctggcggcatcggcccggcgatgatgtgcgagatgatcaggcgtaacgacctgctgcgcctgtcgaatgaggtgattaagccgttttactctcagcgcgttcaggaaactatcgccatccttcgccgctacttacccgaagaacgctgcctgatccataaaccggaaggggcaattttcctgtggctgtggtttaaggatctgcccattacgacagagctgctttatcagcgtctgaaaaaacgtggcgtactgatggtgccaggggattacttcttcccggggctggataagccgtggccgcacacgcaccagtgcatgcgcatgaactacgtcccggacccggaaaaaatcgaagcgggtgtgaaaattctcgccgaagagattgagaacgcctggcgcgaggccggttaataaaacctcaggccagattacgcagccgttccgcgcgtaatctggcggggtctatgcagcacagcgcgtgggtgggacaggcttcgacgcaggcgggaccgccctcgcgatgcgcgcacaaatcacatttcagcgcctgaacgcgatcttccacgacccgaacctgcattgccccgaacgggcacgccaccatacagcttttgcagccgatacagcgagcctgctcaacgagccaggctcccgcagcacggtgaatggcccccgtcgggcagacattcgcgcagggcgcatcttcacactggtggcagcccacggccgtggtgaaggtaccccccttaaccacgcggatccgtgacgtaaacgcttctggcgtagcgctgctttgatgcgacatcatgcacgccacctcacaggtgcggcacccgatacatttttctggatccgtcagaataaatcggttcatcagttacgcctcgcgcacgttaaaccccagttctttcgagatagcttccgccgtgtcacgcagcggttttagcaagtttttctcacccacctgcttcatgcgcgacgtcgacagcgaaatggagatggcatagggcacgcgcccgtgaatatcaaagaccggcacggcgatacatgacacacccagctcgttctcttctttatccatcgccatactgtgatcgcgaatttccgccagctcatcatacatcgcgctcagttcggtgatggtgttgcgggtcaaaggttggatctgttcctggtggctttcccagtagctggccacgtaatcctgatgaccaaacgccatatagattttgcccatcgcagaacaatagagcggcatatgctggccgatatatgcgcgcgtgcgcagcataccggttgtcggctcaagcttataaatcaggatcgcgtgatcatcttcacggctggagaagttgaccgtttcgccggtggcaatgttcagcgcctcgaggtgcggcgccgccacgtgaataatattgagcgatgaaagcgccttttgcccgacggcgataaatttggtggtcagacgatagctccctgccgccggcgccggcgtcacgtacccgcacgactgcaacccctgcaataaccggtgcacggtgcttttattcagccccgccagttctgataaatgcgcaagcggacacccgttcggatagttactgaggatttcaatcagcatcaggccgcgaaacaagctctggctacctgctggcctctctttttcttgcgtcatttcgctctcttttatgctcatcaaatggctcctgtttatcgcgccctgatggtagcgcaaagtgtggtttagttcacgatctcaacagaaaaaacacaaccatttgattttaatcgattttgaaaaacgtgaatgtcgttgatctgacaaaatttgatcgttatatttgaaatcagatttcgtatagtgaaatttagcgataaaaaagcactcgcacttgcccctaaaaaaacaggagaacagggatgaaagtgaccttcgaagagttgaaagcggcgttcaatcgggttctgctcgatcgcggtgtaaaagcggataccgcagacgcctgcgccgagatgttcgcccgcaccacggagtccggcgtttattcacacggcgtcaaccgcttcccgcgatttattcagcagcttgacgcaggcgacatcatccctgacgcccagccgaaacgcgtaacgacattaggcgccatcgaacagtgggatgcccagcgttccatcggcaacctgacggcgaagaagatgatggaccgtgctaccgagctggcgtccgatcacgggatcggcctggtggcgctgcgtaacgctaaccactggatgcgcggcggcagctacggctggcaggcggcggagaaaggctatatcggcatctgctggaccaactctattgccgtgatgcccgcgtggggatcaaaagaatgctgcatcggcacaaacccgctgatcgtcgctatcccgtcgaatccaatcaccatggtcgatatgtcgatgtcgatgttctcctacggcatgctggaggtaaatcgcctggccggacgcgaattaccggtagacggcggctttgacgatgaaggcaatctgaccagagagccgggcgtgattgagaaaaaccgtcgcattctgcccatgggctactggaaaggttccggcttgtcgattgtgctcgacatgatcgccaccctgctctctgacggcgcgtccgtcgcggaagtgacccaggacaacagcgacgaatacggcgtatcgcagatctttatcgccatcgaagtggatcgcctgatcgacggtccaacccgcgatgccaaactacagcgcatcatggacttcatcaccaccgcagaacgcgctgatgaaaatgtcgccgtccgtctgccaggccatgagttcacacgcctgctggaggagaatcgccgcaacggcatcacggttgacgacagcgtgtgggcgaaaatccagtctctgtaaggagtgggtcatgatattcggacatattgcacagccaaatccatgtcgcctgccgctggcgatagaaaaggcgcttaattttctgcgtaccacggatttcaccaccctggcgccgggcgtgatcgaaattgaaggccgcaacatttttgcccaggttctcgacctcaccacaaaggaacaacacgagaaccgccctgaagtccatcgccgctatctggatatccagtttctggcctggggcgaagaaaaaatcggtattgctattgataccgggaataacaaaatcagcgaatcattgctggagcaacgggatattattttttatcacgacagcgaacatgagtcatttatcgaaatgatacctggcagttacgccatatttttcccgcaggatgttcaccgtcctgcctgtattaaaaacaagggatccgcaattcgtaaaattgtggtgaaagtggccatcagcgaattagattaattttctgataaatacaggaatgcgaaatgaccaacaccggttttattattggtgcgtacccctgtgcaccctcatttcaccagaaaggggagcaggaagaatacgccttctggcgggaactttccgacacgccaaatattcgcgggctggaacaaccttgccttgaaaatctccatccgtttggtgatgaatggctgtttcgtcatacgccgggcgactggcagatcgttgtcacagccgttatggaaaccatgcgccgccgcggcagcaacggcgcgtttggcctggcgtccgcggacgaagaacagcgtaaagcgtgcattgaatattaccgccatctgcatcaaaagattgatgccgttaacacccgctttcccgggaaagtgatcgctctggaaatgcaggccgcaccgcaggcgggtaatgattctgtcgagcaagcgacagaagcattctcccgctcggtacgggaaatcgcgagctgggactggggctgcgatctggtgctggaacactgtgatgcgatgaatggcccggcgccgcgtaaagggttcttgcccttagagcaggtgctggaggtagtgaaagagaccgatatcagcgtctgtatcaactgggcacgttcggccatcgaaggtcgcaacaccgcccttccgctggaacatgttcaggcggcactcgctgccgggaagctgggggcgctgatgttttcgggcacgacccctcacggtgagtatggagaatggcaggatctgcacgcgccgttttcttcgttctgcgccgacagtctcatgtccactgaacatgtaaaaacgctgtttactgcggcgagcgccgcaacattgaaattctccggtattaaattactggaaataaatgctaatgctgacgtcagccatcgcatcgctattttgcgcgacggcattagcgctatgaataaagcgtcacaataaaaataaagaatacattttccggttaccttcaatgagatattaactatgaatatttcttctaatgctctacacgcggacattccgcgccagcgctggctaaggatcattccccctattcttatcgcctgcattatttcctatatggaccgcgtaaatatagcttttgcgatgcccggcggtatggatgaagagctgggcatttccgccacgatggcgggcctggcgggggggatcttttttatcggctatttgttcctgcaagttcccggcggcaaaattgccgtgcacggcagcggtaagaagtttatcggctggtcgctggttgcctgggcggtgatctcggttctgaccgggcttgtgaccaaccagtatcagctgctggtactgcgcttcttactcggcgtggcggaaggtgggatgctgcccgttgtgctcacgatgatcagtaactggttcccggatgccgagcgcggccgcgccaacgcgattgtgatcatgttcgtgcccatcgccgggatcatcaccgccccgctgtcgggctggattattaccgctctcgactggcgctggctgttcattattgaaggtctgatgtccgttgttgtgctggtgctgtgggcgttcaccgtctacgaccgaccgcaggaagcacgctggatctctgaggccgagaaaaactacctggtacaaacgctggcggcagagcagcaggccattgcgggtaaagaggtgaaaaacgcctcgctcagcgcggtgctgtctgacaaaaccatgtggcagctgatcgccctcaacttcttctaccagaccggcatttacggttacaccctctggctgcccaccattctgaaggagctgacacacaccagcatcggccaggtgggaatgctcgccattctgccttacatcggcgccattgctggcatgttcctgttctctacgctctctgaccgcaccggcaagcgcaagctgtttgtctccctgccattgattggctttgcgctctgcatgttcctctccgtggcgctgaaagagcacacctggctggcctatgccgcactggtgggctgtggcttcttcctgcaatccgcagcgggcgtgttctggaccatcccggcgcgtctgttcagcgctgagatggcgggtggcgctcgcggcgtgatcaatgccctgggcaacctcggcgggttctgcggtccttatgcggtaggcgtactgatcaccctgtacagcaaagacgcaggcgtttactgcctggcagtttcgctggcgctggcatcgctgctggccctgctgttaccggcgaaatgcgatgccggagcagagcccaaccccacggtgactccacataaacgtgcggcctgaggccctcacctgacccactaaaccaaaccgtaggccgggtaagcgaagcgccacccggcaattaagcgagaagaagatgagtgaaaaagagcccttctggctgggtatcgattgtggcggtacttatctgaaagccggtttatacaacagccagggcaaagaagtctgtattgaacgccgctcagtggccacgctcagcccacgcgccggctacgccgagcgggatatgcaccagctctggcagcactgccacaaaactgtcgccctgctgctcaaaaattcaggcgctgacggcggtcagatcaaaggcgttggcatttcagcccagggcaaggggctgtttctgctcgataaacaggatcgccccttgggtaacgccattctctcctccgatcgccgtgcgctggagatcgtgcaacgctggcagcaggacggtatacccgaaaagctctatccgcatactcgccagacgctgtggacggggcatccggcctcactcctgcgctgggttaaagagaacgagccgcagcggtatcagcaaattggcagcgtgatgatggcgcacgattacctgcgctggtgtctgaccggggtcaaaggctgcgaagagagcaacatctcggaatccaatctctacaacatgaataccgggcagtacgatccgcagctcacgcgctggctcggcatcagcgacattgacggtgccctgccgcctattatcggttcagcagaaatttgcggggaaatcaccgctcaggcagccgcactgaccggtctcacggcgggtactcccgtcgttggtggactgtttgatgtggtttccaccgcgatctgcgccgggctgcatgacgaacatacgctgaatgccgtaatggggacctgggccgtaaccagtgggattgcccacggcatccgcgacaacgagcctttcccctacgtctatggccgctacgtccatccgcagcagttcatcgttcatgaagccagccccacgtcgtccggcaacctggaatggctgacggcccaatggggcgatatgtcattcgatgagattaaccacgccgtggccagcctgccaaaagctgaaagcgatgtgttcttcctgcctttcctctacggcagcaacgccgggctggagatgaccagcggcttctatggcttgcaggcgctgcatacccgcgcgcacctcctccaggcggtttatgaaggggtggtattcagccacatgacccacctcaaccgtatgctcgaacgctttccccacgtgcaggccctgcgcgtgacgggcggcccaacccattcggacgtgtggatgcagatgctcgcggacgtcagcggcctggcgattgaactcccgcaggtggaagagaccggctgttccggtgcggcgctggccgcgctcgtcggtacaggcctctatcccgatttttacgccgctcagcgcgccctcaggcatgacatccggatgattgaacctgacatgcgtgcccatgccgcctaccagcgcaaatatcaccgttaccagctactgatttcagcattacagggctatcacgcccgtgttaaggagtacgacctatgagccgaccattattgcagctggcgctcgaccacacctcgcttcaggccgcgcagcgcgatgtcgcgacgctttccgatcacgtcgacatcgtcgaagccggcaccattctatgcctgaccgaagggctaaacgccgttcgcgccctgcgtgcgcagtgcccggataaaattatcgtggcggactggaaagtcgccgatgccggagaaacgctggctgatcaggcgtttggcgcaggcgcaaactggatgaccatcatctgtgccgccccgctggccaccgttgaacgtggccacgaggtcgcactgcgcggcggcggcgagatccagatggagctgtttggcaactggacgctggacgacgcgcgcgcgtggcatcgcatcggggtgaagcaggcgatttaccaccgcgggcgcgacgcacaggccagcggccagcagtggggtgaggcggatctcagcaaaatgaaggcgctgtccgatatcggtttgcagctttctataactggcggtatcacccccgctgacctgtcgctgtttaagcagatcaacgtcaaagccttcattgccgggcgcgcgctggcaggcgccgataatccgccgcaggtggcacaggcattccattcgcaaatccgcgacatctggggagagtaaccatgcgtcagcatccgttaggcatttacgaaaaagcgctgccaaaagatctctcctggccggagcgcctggttctggcaaaaagctgcggcttcgattttgtggagatgtcggtggatgagaccgacgagcgtttatcgcgccttgaatggagtaccacgcagcgcgcctctcttgtggaagcgatgctggagaccggcgtggccatcccgtcgatgtgcttgtctgcccatcgtcgcttcccgtttggcagccgcgatgaaatcgtgcgcgaacgcgcccgcgagatcatgaccaaagccatccggctggcccgtgatttgggtattcgcaccatccagcttgcgggttatgacgtgtactacgaggagcacgatgagggcacgcaacagcgctttgccgaagggctggcgtgggccgtagagcaggccgctgccgcgcaggtaatgctggcggcagagatcatggacactgcgtttatgaactccatcagcaagtggaaaaagtgggacgacatgctcgcctcgccgtggttcagcgtttacccggacgtcggcaacctgagcgcgtggggcaacgacgtcaccgccgagctgacgctgggcattgaccgcatcgccgctatccacctgaaagatacccggcccgttaccgagcaaagccccggacagttccgcgacgtgccgtttggcgagggctgcgtcgatttcgttggagtgtttaacacgctgaatcaacttaattatcgcggcgcatttctgattgaaatgtggaccgagaaagccaaagagccggtgctggagatcatccaggcgcgccgctggattgaagcccgaatgcaggaaggaggcatgacatgttagaacaactcaaagccgaggtgctggcggcaaatctcgccctgcccgcccaccagctggtgacgttcacctggggcaacgtcagcgcggttgaccgtgccagcggcatgatggtgatcaaaccatccggcgtggagtacgacgtgatgaacgcagaagatatggtggtggtaaatatcgccacgggaaaagtggtcgaggggagtaaaaagccctcctccgacaccccgacccatctcgcgctgtatcgtcgttacccggaaattggcggcattgtgcatacccattcccgccacgccaccatctggtcgcaggcggggcaggatttacccgcgtggggaacgacgcacgcggactatttttacggtgcgatcccctgcacgcggctgatgaccacggctgaaatcgcgggtgaatatgaataccagacgggggaagtcattatcaaaaccttcgaggagcgcgacataagcccgatgcaggtcccggcggtgctggttcattctcacggcccgtttgcctggggcaaagacgctgccgatgcggtacacaatgccgtggtgctggaagagtgcgcctatatggggcttttctcgcgccagcttgcacctcagcttccggttatgcagcaggaattgctggataagcattacctgcgcaagcatggcgcaaatgcctattacggccagtgatcatccggaattaatatgctctttacagtaccgccgtttccagacggcgggcgttaacccggtatgttttgagaatatttgccggaaataacccacgtcattaaaaccgcaccgggcggccacttcagttaatgaggccgcatcgttcagcagcagtttttcagcggccctgacgcgctggcggtgaattgcctccgtcagggttaaatgaaacgtccgacgaaatactcgccccaggtaatctgcgttgcagtgcagttctttcgccagctgcgaagtggacaggggcaaatgaaagtgcgtgcggataagctgcttggccttccatgccattgccgcgcccgcatcatccgctttatcttcatatcccggcgagagcgatatctgctgcaaaattaacagcaaaattatctccagcgcctggctacgctgtaatttttcctgctcgcttaaaaactgacggaataacgcaataacatattgcggatcccgcacgctacagtgttgctcaatcgacagcggcgtcgcgcctggcaacaccggcaagcgttcatccacctcaaaatgcagccagtaaaatttgagatcgcccggaaaatcttccacgccgacatgccgccgcttcggccaaagtaataaactctcgccagcgtttacctcaaacagcgtattttcctcctggatcgttaatgtccctttttcgacaaaaattatctcccacgaagataattttcgtgcgggatgacggcccacgccccgggagataaataacccgccattttgaaccctgatcggaagtgctatggataattcaagcatggatattcatttttccgcttttatagtggctgatattgtctttatcccttgattattaataaatatcagcagaacggttcgatcaaactcacagttttaccatcaggtcggaatcgtcacctttttatacttttcccttcccttgttggtctgcccgttgaatgcagaataaatggggtaccttgcacaaatacgataaaaaaatcgtttatcgaggagttaccccatgacttccacaccgattacagacgcagaagttgcaaaacaggcagccgatgaccggctgtcagtccgcgagaaaattggctacggcctgggcgacgcgggcggcacggtaattacctgcctgatcatgaacttcctgacctttttctataccgatgtatttggcctgacgcccgcgctggtgggcacgctgtttattgcccttcgggtatttgacgcgatttccgatccggtgatgggcgtgattgccgaccgcacgcagagccgctgggggcgttttcgtccctggcagctgtgggtcgcgcttccgatcgggatcgtcggcgtgctgaccttcaccgtcccggacgccagcatgggcgtgaaaatcgcctgggcgttcggcacctatctgttgctttcagtgggctataccgccatcaacgtgccatattgcgcgctgatcaacaccatgaccacccgtcacaacgaggnnnnnnnnnnnnnnnnnnnnnnnnnnnnnnnnnnnnnnnnnnnnnnnnnnnnnnnnnnnnnnnnnnnnnnnnnnnnnnnnnnnnnnnnnnnnnnnnnnnnnnnnnnnnnnnnnnnnnnnnnnnnnnnnnnnnnnnnnnnnnnnnnnnnnnnnnnnnnnnnnnnnnnnnnnnnnnnnnnnnnnnnnnnnnnnnnnnnnnnnnnnnnnnnnnnnnnnnnnnnnnnnnnnnnnnnnnnnnnnnnnnnnnnnnnnnnnnnnnnnnnnnnnnnnnnnnnnnnnnnnnnnnnnnnnnnnnnnnnnnnnnnnnnnnnnnnnnnnnnnnnnnngcgcttcgtactgtgcggcgtggcgggttttctggtctccgttggcctgccgtggctggtgtcagagctgggacagggcaataccgcccggggttatcagctgggcgtcggcgtgctgtgcaccatcgccgtggtgatgttcctgtgctgcttcttctgggtgcgcgagcgcgtcccgcttgcgctgatgggtaaattcaccctgcgcgagcacctggcgggcctgcggaaaaacgatcagctgctgctgatgctggtgatgtcgtttctgctgatcaacgtcttcaacattcgcggcggcggatacatgtacttcatcacctacgtgctccagggcagcacggcgtacacttcgctgtttttcaccatggtgacctttgccgccattctgggcgcggtgatcgtcagtccgctgtcgcgccgaattgataccgtcaaactctactactacaccaacctggtgctcgctgcgcttgcggtgggaatgtggttcctgccgggtggcccggcgcaccagacgctctggttgatcgtgattttaagtaacggcgtgatcctgggcttcaccctgccgctgcacttctcgctgatggcctttgccgatgactacggcgaatggaaaaccggcgtgcgctcatcggggatgaacttcgccttcaatctgtttttcatcaagctcgcgtgggcatccagcgccgggatcatcagcctggtgtttattgccgtggcctatcagccaggcgcaggtaaccagacacccgcctcattgcagggcatcaccgccatggagacgctgcttcctgcccttttccacctgctgctggcggtcgctatccgctggtgcaggcttaacaatcccgtgatgtcgcgcattgccaccgatttgcgccagcgtcatgtacagtcctgaggagaacgatatgaccataatggaagccgacctgcatcagctgaaaatcaacgacccgtttcttggtcagtaccaacggctggtccgcgatgtggtgatcccctaccagtgggatgcgcttaacgatcgcgtggcggaggccgaacccagccacgccatcgccaacttccgcatcgccgccggtctggaacagggggagttctacgggatggtctttcaggacagcgacgtggcgaaatggctcgaagccgtggcgtggtcgctgtgccagaagccggatgctgaactggaaaaaaccgccgacgaggtgatcgcgctggtcgcagcggcgcagtgcgaagatggctatctcaatacctatttcacggtgaaagcaccggccgagcgctggaccaatctggccgaatgccacgaactgtactgcgccggacatatgattgaagcgggcgtggcgtatttccagggaaccggaaaacgccgcctgctggacgtggtgtgcaggctggcggatcatatcgacagcgtgtttggcccgggcgaaaaccagctgcacggttaccctggccacccggaaatcgagctggcgctgatgcggctgtacgacgtcacgcaggagcaacgctatctcaatctggtgaaatactttattgaggaacgcggcgcgcagcctcacttctacgatatcgaatacgagaagcgcggcagaacgtcatactggaacacctatggcccggcgtggatggtcaaggacaaagcctacagccaggcgcatctgccccttgcggaacaacaaacggccatcggccacgccgtgcgttttgtctatctgatggcgggcatggcacatctggcgcgcctgagctgcgacgaggggaaacgtcaggattgcctgcggctgtggaacaacatggcacagcgccagctgtacatcaccggcgggattggctcccaaagcagcggcgaggcgttcagcagcgattacgatctgcccaacgatacggtctacgccgaaagctgcgcctccatcggcctgatgatgtttgcccgccggatgctggagatggaggcggacggccactacgccgacgtgatggagcgcgcgctgtacaacacggtgctgggcggcatggcgctggatggtaagcatttcttttatgtgaatccgctggaagtgcacccgaaaaccctggcctttaaccatatctatgaccacgtcaaaccggtgcgccagcgctggttcggctgcgcctgttgcccgccgaatattgcgcgcgtgctgacctcgctggggcactacatttataccgttcgcccggacgcgctgttgatcaacctgtacgtggggaacgacgtcgccattccagttggggataacatcctccagctgcggattagcgggaactatccgtggcatgagcaggtgaaaatcgagattacctcaccagttccggtgattcacacgctggccctgaggctgccggactggtgtgcggaaccggctgtttcgctcaatggtcaggccattacaggcgaggtctcccgtggatacttatacctcaaccgaagctggcaggaaggcgacacgctgacgctgacgttaccgatgccggtccgccgcgtgtacggcaacccgcaggtgcgccagcaggcggggaaagtcgcattgcagcgtggaccgctggtttactgcctggaagaagccgataacggcgcaaatctgcataacctttctttgccccaggacagcgcgtttcgggttttcgaaggcaaaggcattttcgcgcacaagatgctgatacaggcggaagggatcgggtgtcaggcgaagggcactgatgccctgtggcagtacgaccactcgccggtagaacgtcagccccggacgctgacctttattccgtggtacagctgggcaaaccggggagaaggggaaatgcggatatgggtggatgaaagctgaataactgcggcctgttgccctcaccccagccctctcccacgggagagggagtaaaaaagtaggccgggtaaggcgaagccgccacccggctttaacccggctcaggtcaccccacccggaacggcctgagcccggagattaaaacagccccagcggtttatcggagtagctgactaacagacatttcgtttgctggtagtgctccagcatcatcttatgggtttcacgcccgatgcccgactgcttgtagccgccaaacgccgcatgagccggataggcgtgatagcagtttgtccatacgcgtccggcctgaatgccgcggcccattttataggccagattaccgttacgactccagacgcccgcccccaggccatactgcgtgtcgttggcgagctccagcgcctcgtccatggttttaaacgtggtgacggccagcaccggtccaaaaatttcctcctggaaaacgcgcatgttgttcttaccgaacaggatggtcggctcaaggtagtaaccctcctgcaaatcgccgcccagcaccttacgacgaccgccggtcaacacatcggccccctcttttnnnnnnnnnnnnnnnnnnnnnnnnnnnnnnnnnnnnnnnnnnnnnnnnnnnnnnnnnnnnnnnnnnnnnnnnnnnnnnnnnnnnnnnnnnnnnnnnnnnnnnnnnnnnnnnnnnnnnnnnnnnnnnnnnnnnnnnnnnnnnnnnnnnnnnnnnnnnnnnnnnnnnnnnnnnnnnnnnnnnnnnnnnnnnnnnnnnnnnnnnnnnnnnnnnnnnnnnnnnnnnnnnnnnnnnnnnnnnnnnnnnnnnnnnnnnnnnnnnnnnnnnnnnnnnnnnnnnnnnnnnnnnnnnnnnnnnnnnnnnnnnnnnnnnnnnnnnnnnnnnnnnnnnnnnnnnnnnnnnnnnnnnnnnnnnnnnnnnnnnnnnnnnnnnnnnnnnnnnnnnnnnnnnnnnnnnnnnnnnnnnnnnnnnnnnnnnnnnnnnnnnnnnnnnnnnnnnnnnnnnnnnnnnnnnnnnnnnnnnnnnnnnnnnnnnnnnnnnnnnnnnnnnnnnnnnnnnnnnnnnnnnnnnnnnnnnnnnnnnnnnnnnnnnnnnnnnnnnnnnnnnnnnnnnnnnnnnnnnnnnnnnnnnnnnnnnnnnnnnnnnnnnnnnnnnnnnnnnnnnnnnnnnnnnnnnnnnnnnnnnnnnnnnnnnnnnnnnnnnnnnnnnnnnnnnnnnnnnnnnnnnnnnnnnnnnnnnnnnnnnnnnnnnnnnnnnnnnnnnnnnnnnnnnnnnnnnnnnnnnnnnnnnnnnnnnnnnnnnnnnnnnnnnnnnnnnnnnnnnnnnnnnnnnnnnnnnnnnnnnnnnnnnnnnnnnnnnnnnnnnnnnnnnnnnnnnnnnnnnnnnnnnnnnnnnnnnnnnnnnnnnnnnnnnnnnnnnnnnnnnnnnnnnnnnnnnnnnnnnnnnnnnnnnnnnnnnnnnnnnnnnnnnnnnnnnnnnnnnnnnnnnnnnnnnnnnnnnnnnnnnnnnnnnnnnnnnnnnnnnnnnnnnnnnnnnnnnnnnnnnnnnnnnnnnnnnnnnnnnnnnnnnnnnnnnnnnnnnnnnnnnnnnnnnnnnnnnnnnnnnnnnnnnnnnnnnnnnnnnnnnnnnnnnnnnnnnnnnnnnnnnnnnnnnnnnnnnnnnnnnnnnnnnnnnnnnnnnnnnnnnnnnnnnnnnnnnnnnnnnnnnnnnnnnnnnnnnnnnnnnnnnnnnnnnnnnnnnnnnnnnnnnnnnnnnacttatctttcgccttatgcgccgcatccagcgctaaatcgatatcccgcttgcccgaactggcaatttcacacagcggctggccggtaacgggcgtcaggttggaatagtatccgccgtcgacgggcgccacccagtcgccgccgataaagttgtcatagcggggcttcagcttaaggggaaaaccatactcgcctggctggatacgcgatgagggaggattgtttgtcatgaccgtctccttgcagtaggtgtacaacaagggtagttccggctggtgattttctcgccagccggtaacgggtttacgagccgtatcacggattaccgtactttacgtttcgtttctgccgccggagccatacttaatagctcaggggctcatgaggaacgatgcaatgcagctatttatcggctttgacgtgggcggaacccacatcaaacacggcgtgatcaacgaaaacggcgaagaactgacatccgatgaatatgatacgcctgacgatgaaagcaccttcaaacagaagtggaaagcggtggtggataagtaccgccaggagcatgagatcgtcggcatcggcgtgagttttccgggccacatcaatcaccataccggcgaagcggccaaggccggggcgctggattaccttgacggtgaaaacctgtgcgagcttttcgcacagctgaccgatctccccgtaacaaccgaaaatgacgccaactgcgcggcgctgggcgaacgctggcagggcgccggtaaggattatgagcattttgtctgcatcaccatcggcaccggcatcggcggcggtatcgtcatggagggcgatctctaccgtgggtcgcactaccgggcgggtgagtttggcgtgctgcccgttggcaacaacggcgagccgatgcacgaagtggcgtccgccagcggcctgatgaaagcctgccgccgcgcgctggccgtgtcggaagatgagatgcctgacggtgaggagctgtttagacgcatggacagcgacgtgcatctgcgtgaggccatagaagagtgggcgcatttcctctcgcggggcatctacagcgtgatctccatgtttgatccgcaggcggtgctgattggcggcggcattagcgagcaggagaaaatctatctcctgctggataaatacctacagcgattcgaggagtgggaagcgctccgggtgcccatccttccctgcgagctgggtaaccaggcgggaaggctgggtgcggtctggctggctaagcagaagcaggcgcgcagcgcttaacgcttaaggaaataactgcgcgtcgcgtagcacatggtcattgccacgacgacgcgtaaacccgatgcggttgaaatactccaggatctgaatcgccagtttgcgtcctacgttcagccgatcgcggaagtctgcggcgcaggttgatccgcgcgcctgatccagctcccggatcaggttcgcaaatgccacgatccgatcgttgcggtaataacgatctttcacgatcgccacaatcatcccctgctgcgccgcatggcgcagtacctgacgcatcagctgctcatcggtattggtttcacgcgccagatcgcgcacccaccacggttcatcgccaaacagcgccgccactttttgccagaccgcgtcctgctcagcggtaaaaccggccttgtgctccggcaggtgcagccaaccgtgatgacttgcaatcacgccgctttcacgcatgttttcaatcagcaacaacaccagcgcgtcgtcttccatgggcaacgccatgcgccgcagacgttcacggcccgggccgggctcatcctgatgctgttcatggtaggtcgccaacgtgctcagcactttgcgctgccagcgcgccgccaccggcgcgttcagcaggctgttgccggcctgaataaaacctggctcctgcgtcagaagacgcaatccttcgccgctgagctggcgcgcccacgcgaacgccgccagatccaccgcaccacgctcaaggtggatatctaacgcagacttatcatcgcgggcctgggccagtgcggccagccactgtaannnnnnnnnnnnnnnnnnnnnnnnnnnnnnnnnnnnnnnnnnnnnnnnnnnnnnnnnnnnnnnnnnnnnnnnnnnnnnnnnnnnnnnnnnnnnnnnnnnnnnnnnnnnnnnnnnnnnnnnnnnnnnnnnnnnnnnnnnnnnnnnnnnnnnnnnnnnnnnnnnnnnnnnnnnnnnnnnnnnnnnnnnnnnnnnnnnnnnnnnnnnnnnnnnnnnnnnnnnnnnnnnnnnnnnnnnnnnnnnnnnnnnnnnnnnnnnnnnnnnnnnnnnnnnnnnnnnnnnnnnnnnnnnnnnnnnnnnnnnnnnnnnnnnnnnnnnnnnnnnnnnnnnnnnnnnnnnnnnnnnnnnnnnnnnnnnnnnnnnnnnnnnnnnnnnnnnnnnnnnnnnnnnnnnnnnnnnnnnnnnnnnnnnnnnnnnnnnnnnnnnnnnnnnnnnnnnnnnnnnnnnnnnnnnnnnnnnnnngcttgccgcgacggggcggatccagcatgaccacgcgcgcgcccgccagcgtttcccgcgccgaaatatcgcgcagaaccaggcggtcgttatccgccagccagagcggggagtcgaacaccagttcggcgagatcgttttccagcagcgacacgcgtccggtgatgtggctggccgcgtggtggatatgcagcggctgccactgggtcagcggcgtgtgggtctggagtgaaacgatgatccgttcagaaggctccggcggtgcgtcggccagcagccagtcgccgcggttaagctggtctttttcggcatcaccggcaatattcagggcgatacgctgcccggcgtgggcctgttccaccggctggttttgcgcgtgaagcccgcgcacgcgcatcggtttgttcacgcccgtcagccacagggtatcgcccacgttcacttcgccgctcagcgcggtgccggtcaccaccagcccagcccctttcacggtaaacgccctgtctatcgccagacggaagcggtgatggctggcatgttcacgagacgggatctgctgcaaatggtcgcgaagagcgtcgataccgcggccttctgtcgccacggtgacaaacagtgcggcatccctaaaaccgtactcactcagcgccgccagcacctcttcacgcacctcgtcgatacgcgcctcatccacacggtccgctttggtgagggcgacggtcaactgcgggtttcccgtcagctggaggatcgccagatgctcgcgcgtttgcgccatcaccccgtcatcgcacgcgaccaccagcagagcatgatcgatcccgcccacgcccgcgagcatattggacagaaacttctcgtggccgggcacgtcgataaagcccagcacgcgaccgtcgggctgcggccagtaggcgtaacccaggtcaatggtcatgccgcgctttttctcttccggcaggcgatcggcattcacgcccgtaatggcctgcaataacgtggttttgccgtggtcaacatgaccggcggtggcaataatcatttcaacatcatctccagaaaccgcacttcatcttccagacagcgtaaatccagccacatgcgcccgtcaccgatccggccaatcaccggcgtcggtaatgcgcgccagcgcgccgacagcgcctcaagctggcttccgcgtccgtcgcgcggggtgaacgtcagcgcttcgctcggtaacctgtccaccggcagcgagccgctgccaatttgcgacaggcaaggctcgttacgaacgtcaaactcagggtaatgaggagcaacctgcggcagtagcgcttccgcctgcgcgcgaatggaggccgcatcacggctcagcaaacgcaacgtgggcaggcgatcagccagtttctccgggtggagatagagccgcagcgtggcttccagcgcggccagcgtcattttatcggcacgcagggcgcgcttcagcggatgctgctgtagctgcgcaatcagctcgcgcctgccgacgataatccccgcctgcggcccgcccagcaatttatcaccggagaaactgaccaggcttacgcccgcggcaaccatttcctgcaccatgggctctttcggcagaccgtactggcgcatatccaccagcgacccgctgccgagatcggcaatcaccggcacgtttagctcgcgcccaatggcggccagttcggcctcttccaccgttttggtgaaaccctcaatgtggtaattgctggtatgcactttcatcagcagggcggtgttttcattcatcgccgcgcgataatcttttgcatgggtacggttggttgtgcccacttcatgcagcgtgcagcccgcctggcgcatgacgtccggaatacgaaacgccccgccgatctccaccagctcgccgcgagagacgacaacctcttttccgctcgcggtggccgccagcattaacagcaccgccgccgcgttgttattcacaatgcaggcatcttccgcgccggtgatctggcagagaagatccgccagtgcgcgatcgcgatgcccacgcccggcgccgtccagatcgtactccagcgtcaccggcgagcgcatggcacgggtgacggcctctgttgcctcttcggcctgctgtgcccggcccagattggtgtgcagaaccgtgcctgtcaggttaataaccgggcgcaacgcgctttgcccgtgcttgctcagcctgcgttcaacttcctgcgcccacgccacgcaccagccgggtagcgcgttctcagcctgaatatggcgacgcgcatcgtcctgaagctggcgtagcatgtcgaccgttgcagtatggccaaactgctccagcaccgcagtgatgcgcgggtcacgaagcagtcgatcggtagcggggatctggctgtagagggaatgatgagtagtcatgaatgcgcctggcgagtaaatatcttcccccctcccgacgggagagggagttaacatgtggggggattgtaccgcctcccgccaggaagtgttataacccgcatcaagcctttggcggttcagtccgggcaaaactttcgcgctggaagagcgtctccgccagtttgaccagcagcggacgatccacgcaccagcccggcgagacgcggcggaaattgaggtagccaatggcgcaggcgatggcgatcgtcgccagattcaggctatcgctctgaattttcccgtcgcggatcagctgttcgcacatatccaggctgcggctgattttttcgcgctggcgcagcagctcattttctgactgctgggcggcgggccttgcctgctcgcgtacggacgtcaatgccgcatccataatgccatccgccagggcttcaatttgcttcatcgccagcgctgcttttggatccgccggcagcatggctggcgcaacgccaagcagttcgatgtactccgcaatgatcggggaatcaaaccagtaatcgccctcgtccgttaccagcgccgggactttccccagcgggttgtactgcgcaacgccgttctctgcgttgtagggctgttcatttacgaattcaaattcaatccctttctccagcaggagaatcgaaatcttacgcacgaaaggactggtataactgccgatgagtttcattgcttatccttaatgcccacaaagaggtcagtatggatcaagccgtggaaaaaggcaggtgcgcgtatcgcattcctgccatgaggggatacgggagaaatctgcataaaaatattttgtgaatcaaatcacaatctggaaacaaacaaccaacttaacattgtgatgcaaatcacaaaacaccgcccattttggcgtaattctgagcgatgtattttttttacacactcgttatgtgatcgcgatcacttcattaatgtcctcaccccctacattcatgtgattcagatcacacaaaatttcactgtctggacagttgaacgattcagtgccagatttcacagcatcagaacagggcccggctacctctgccgccgcacattaacgataaacctcgggccacaagcctaagcgtaaacataagaaggggtgttttatgtcatccgatttcaagatcaaagtgcaaagctttggtcgtttcctcagcaacatggtgatgccaaatatcggcgcgtttatcgcgtggggtattatcaccgcattatttattccgacagggtggttgcctaacgaaacgctggcaaaacttgttggcccaatgattacctatctcctgccactgctcatcggttataccggtggtcgtctggtgggcggtgaccgcggtggcgtcgtgggtgccatcacaaccatgggggtgatcgtcggtgcggatatgccgatgttcctcggtgcgatgattgccggtcctctgggcggctgggcaatcaagaaattcgacgtctgggttgatggcaagatcaaatccggcttcgaaatgctggtgaacaacttctctgcgggcatcatcgggatgatcctcgccattctggcattcctcggcattggcccggcggttgaagtgctgtccaagctgctggcggcgggcgttaacttcatggtggcgcacgacatgctgccgctggcgtctatctttgttgaaccagcgaaaatcctgttcctgaacaacgccatcaaccacggtatcttctcaccgctgggtattcagcagtcacacgatctcggcaagtccatcttcttcctgattgaagcgaacccgggtccaggtatgggcgttctgctggcgtacatgttctttggtcgcggcagcgcgaaacagtctgctggcggcgcggcgatcattcacttcctgggcggtattcacgaaatttacttcccgtatgtgctgatgaacccacgtctgatcctggccgttatccttggcggtatgaccggcgtgttcaccctgagcgtactgggcggtggtctggtgtctcctgcttctccaggctctatcctggcggtgctggcgatgaccccgaaaggcgcctacttcgcgaacatcgcggcgatctgtgcggccatggcggtctccttcgtggcctccgctatcctgctgaaaaccagcaaggtgaaagaagacgacgatatcgaagcggcaacccgtcgtatgcatgacatgaaagccgaatccaaaggcgcaacgccgctggcggcgggtgatgtctctaacgacctgagccacgtgcgtaaaatcatcgtggcctgtgatgccggtatgggctccagcgcaatgggtgcgggcgtactgcggaagaaagtgcaggatgcgggtctgaccaacatctccgtcaccaacagcgcgattaacagcctgccgccggacgttgacctggtgatcacgcaccgcgatctgaccgaacgcgctatgcgtcaggtaccgcaggcgcagcacatttccctgaccaacttcctcgacagcggcctgtacgccagcctgaccgaacgcctggtggcggcgcagcgccatgaagataacgaagtgaaagtgcgtaccagcctgcaagacagcttcgacgagagcaacgcgcatctgttcaaactgggcgctgaaaacatcttccttggccgcacggcgaccaataaagaagaggccattcgcttcgccggtgagcagctggtgaaaggcggctacgttcagcctgagtacgttgaggcgatgctggaacgcgaaaagctgaccccaacctacctgggtgaatccatcgcggttccgcacggtacggtggaagccaaagaccgcgtgctgaaaaccggcgtggtgttctgtcagtatcctgatggcgtgcgcttcggtgaagaagaggacgacatcgcccgtctggtgattggtatcgccgctcgcaacaacgagcatatccaggtgattaccagcctgaccaatgcgctggatgacgaaacggttattgagcgtctggccaacaccaccagcgttgaagaagttctggccctgctgaacaagtaacagcgcctcttccctctnnnnnnnnnnnnnnnnnnnnnnnnnnnnnnnnnnnnnnnnnnnnnnnnnnnnnnnnnnnnnnnnnnnnnnnnnnnnnnnnnnnnnnnnnnnnnnnnnnnnnnnnnnnnnnnnnnnnnnnnnnnnnnnnnnnnnnnnnnnnnnnnnnnnnnnnnnnnnnnnnnnnnnnnnnnnnnnnnnnnnnnnnnnnnnnnnnnnnnnnnnnnnnnnnnnnnnnnnnnnnnnnnnnnnnnnnnnnnnnnnnnnnnnnnnnnnnnnnnnnnnnnnnnnnnnnnnnnnnnnnnnnnnnnnnnnnnnnnnnnnnnnnnnnnnnnnnnnnnnnnnnnnnnnnnnnnnnnnnnnnnnnnnnnnnnnnnnnnnnnnnnnnnnnnnnnnnnnnnnnnnnnnnnnnnnnnnnnnnnnnnnnnnnnnnnnnnnnnnnnnnnnnnnnnnnnnnnnnnnnnnnnnnnnnnnnnnnnnnnnnnnnnnnnnnnnnnnnnnnnnnnnnnnnnnnnnnnnnnnnnnnnnnnnnnnnnnnnnnnnnnnnnnnnnnnnnnnnnnnnnnnnnnnnnnnnnnnnnnnnggctagggtgaggggaaaacgttcctcaccccagccctctcgggtaaaaacattgatgaaggttaacactatgaaagcattacattttggcgcaggtaatatcggtcgtggctttatcggtaaactgctggcagacgcgggcattaccctgacattcgccgatgtgaatcaggtggttctggatgccctgaatgcccgtcatagctatcaggttcacgtggtgggtgaaaacgaacaggttgaaacggtctctggcgtcaacgcggtaagcagcattggcgacgacgtgattgacctcatcgcgagcgttgatctggtcaccaccgccgtgggtccggtggtgcttgagcgtatcgccccggcggtcgcgaaaggcctggcgaagcgtaaagcacagggcgttgaaacaccgctgaacatcatcgcctgtgaaaacatggtgcgcggcaccacgcagctgaaaggccacgttcttgcgaccgtcgcagacgaagataaagcctgggttgaagcgcacgtaggttttgtggattccgccgtggatcgcatcgttccgccttcagcatccgccaccaacgatccgctggaagtgaccgtggaaaccttcagcgagtggatcgttgataaaacccagtttaagggtgcgctgccgaccattccgggaatggaattaaccgataacctgatggcatttgtcgaacgtaaactcttcacgctgaacaccgggcatgctataaccgcgtacctcggaaaattggccggtcatcagacgattcgtgacgcgatcctcgatgagaacatccgtgcggtggtcaaaggggcaatggaagagagcggcgcggtgctgatcaaacgctacggttttgatgctgataaacacgcggcatacatccagaaaatcctcggtcgttttgaaaacccgtatctgaaagatgacgttgagcgcgtgggtcgtcagccgctgcgtaaactaagcgcgggcgaccgcctgattaaaccgctgctgggcacgctggaatacggcctgccgcacgctaacctggtgaagggcatcgctgccgccatgcactaccgcagcgagcaggacccgcaggcgattgagctggctcagctgattgatgacaaaggcgcgcaggctgcgctggcgcagatctccggtctggatgccaacagtgacgtagttgcggaggcggtcagcgcatacaacgcaaccaaatgatgcagagtccggcgcaggttagcctgcgcccgaataacagattgtcagatatgcaggcaataatggaacaaacccaggcctttgaaaatcgtgtgcttgagcgtctgaatgctggcaaaaccgtacggagtttcctgattgccgccgtcgagctgttaaccgaggcggtgaacattctggtgcttcaggtgtttcgcaaagacgactacgcggtaaagtatgctgtagaaccgttactggacggagacggaccgctgggcgatttatcggtacggctgaagctgatttacggtcttggcgtgctgaaccgccaggagtatgaagacgccgagctgttaatggcgctgcgcgaagagctcaatcatgacggtaatgagtacacctttaccgatgatgagatactggggcccttcggcgaactgcactgcgtatccgcgctccctcccgcacctcagtttgataacagcgaccctgagctgtacgcgatgcaaaagctgcgttatcaacaggttgtgcgctccaccatggtgctttccctgactgagctgatttctaaaatcagcttaaaaaaagcgtttcagaagtaagcccgcacacattggtgtatccttccctgtaaattccccgttttcagagttatttgtcatgaaagaagtcgaaaagaacgaaattaaacgcctgagcgaccgtctggatctgatccgccatcagatggctggcctctccctggtcgattctgccgagaaatatgccgagctggaaaaagagtccgtgaagctggaggcggaaattgaacgcctgcgcgaagtgaaaggccagaagctgagtaaagaagcgcagaagctgatgaacatgccgcatcgccgcgcgatcaccaaaaaagagcaggccgacatgggcaagctgaagaaaagcgtccgtggcctggtggtggtgcacccgatgactgagcttggtcgcgaaatgggcctgaaagagatgacgggtttttgtaagaccgcgttctaatcgtcctcccctgccgctgcggcaggggaaactcagttgtaaatcaggttaaacgtcgccatcgcatccgcttttcccgccgtcacgttctcttccgtctgaaggtaatgcgcatcaaaccagaaggtttgcgtctggttatcccccacttgcccaaatgctgacacctgtggggtgttccacggtaccacctgcccctgaaccgaaccggtattgtcaccgtaaagcagttcgatcccgacaccgctggcgctatcctcctgcttcgtcaatgccagcgcccgatcgttgcccggcgtggtatcgccaaagaaacccatcttcaccgccgtgttattttcgcaggtcaccggaatgctgaagcgtccgcctccggcgcgggagcctatgccatgaaattcacgctggctcacgctccccatgggaacaagaatgctgcgagagcccactgaacagctggtacgcctgacggtgaagctggcgagatggatctgtaccggtgtcgccacgttggtggcgctggcttgattttctcccgcctgcaatatcagcgatccgacattttgctcctgggaattggcgttatcgtcaggcatggcgctggtcgttggaattttgtaaaacaccacccagaactgcattttatacattgaggcgctggcaaaggcggggttttgcgatgcgtcgcaaatgcgccgggactcattgccattcacctgacttgtgccgtcaatatagcgtaccgcatcggcgccgcagtactgctgttcccggaaccccagcgcatagccgatgccgtcgatctgagttttatagacgtgacgtgacgctccgtcttcaccaaccacggtgccgacggggttatccacgtcgacaaagccgatactacgccaggcatcattcccgccatcacagctgtagaaatccgccccggtagactgtatcggcgcagatatcggcgtccagtccgccgtgccgggcgcataccctatggcgtagggcacctgaacgacccactgatcgcgcgtggtgcggcaagatgaggtctgagcatgggcatgaaaactcagcatgccaaaaagcgaaagaaggctcaggtagaaaaaccagtgaataaaacgacgcatgatattcctctaatggcactcaacggatagcgtggcgataccgggggccatatgagctttccccagtctgaaaggtgtctggcattgctgctgctccccgtcctgataccagctgacgcgcagggtgccgcgctctggtaccccgctcaggtaggcctgaccgccgtcagcgaccatgcttcggtttgcagaatggcggttctgctccaccacttcagcctgcgcgccaaacggcaacggttcgccgtggtagcgcagggaaaacagaacgcgataaccaatgtgggttttgtaattggccagcaccaccgcgccgctggtgggaatgagcgtcagaccgctctgctcaacgtcgacgttctcacccagcgtcgccgtatcaaggctgacgttatttttgcgatacgccgagagcgttggcatgaccgcatagccgcggctgtcggtatggatcccgttgtagccctccggctcaacgttcgccgcgccgggcacgcgtagcagggcgacggtatcgcccagcggctggctaagcgtgacgccatactgcgtggcgataacgcctccggcgagtccgaggctcgcgttgctaccgcttcggctgtggtcataaccgaggctgacgttgccgtagccaccgttgtattgcagcgccaggctggtactgtcggcttgtccctcgctggccttactctgctgaacgctgtaattaaggttgcgattcgccagcgcactgccgttgagtgacacctgctgcgtggtcatcccacgattgttgtggttgatgaagtaactgaccgagctgtccggtaaccagtgaccaagcggaacattgacgttaaacgacacggtacgatcgggatgctgctcaagcgctgagtcggtgtagtcataccccgcgccccaggaaatgcctcgccagctggtgtaccagccaatgtggatggttttatcctgcccggacgtatgccagtaatcctgcatccatgccgagacgctgaggctgccgaactgacccagcgtctgtgagaaggtgacctgcgagcggctacggcgattattgagttgcagctgttggctgtcagactgattcagttcactgaattcatagtaattgcgcgaggcatagcgataactcgccaggttgaaggcggtgccggtagcgctgaaatctttctgatactgaatgcgccacgcctgccccatcgcgcttttgccattgggtaaacggctttttgccagcgtatcgtcaatgcccagcgagccaaatgcgccaaaccctctgcctacgccaattgcaccggcctgatagttactcgccgtacgaaagccgccatacaccgtcatcctggagagcagaccgtagaagaaagcgccttcaacaaactcaggtgaacgcgcatcgccggagccggagtgaaatcgtccggcgttgaggctgtatttcaggctgcccaggcgtcgcataaacggcaccgcagaatagggttgggtaaagacgcgcgttgagccgtcactttccgtgaccgtcacctgtagatcgccactttgtgcgccggggaacagatcgttaatgataaatggcccggcggccacccaggtttcatagatcacatagccattttgcgaaacggagactttagcgaagctgtgtgcgacgccgcggatggttggtgcgaagccgcgctggctgtcgggcaacatgctttcgcttgatgtgagctgtaccccgcgaaacgccacgctatcgaagacgtcgcctgcggtccaggcatcgccgatccgtagctggctgttaagacggcgaatatcccgggtcagccagctactttgcgactgaaaatggtcgccgcccgcgtcgctgtggctccaggcggaggtgttgcgcaaccgccacgcccccagattgataccgttacgcaggctcagatagctggatgtcgtgacgccacgctgatgatgtgcctggccgcccgacagactgtaatcagtaaaggccgccgggataccatcgtcccactgcgactgcggcacgtagccacggctgcggtgtttcatcgccgcctgcggcaggctgagaaagagacgctgctggttgaaatcataggaggttcgcgctgccggaatgaaatccgcgaggtgcgtgaacgtttctccctcccgcaaccgtgagaatgcaggaatggccctgacattcaccccaagcgcttccagcagcgatacgcttaaaacgggttgcaggctgcctttctcattgacgaaggtgatctcctgatgccgctcctcgcgtccgttaatctccagcgtcacgagccaggtgcctggcatctgcccgcccttttcagagaaatagtgcagatccgccgttttctgttcggtagaggaaagctccagcgcggcgggatcaaagtaatcctcggccatccccgcgcggctgaagctaagcagcaacaccgaaagcggcgcgtaacgaaacaggcgaaaagacatggtcttaaagaggctgggtgtgggtggcggtgatggcaccaaaatcattaatagccgaccagcttacgcccccggaggcggacacaggccattcgcggatttcgcctggaccgatcatgcccggctgctcaattttatgcccgccaacggacagtcgataaaaagagacgtagtatggcgtcgggttggcggccttaagcccttttcccgtccgcgaaaacgttattttctgccaggcagtggcagcgtcccctttcagattgtccgggcggtagaaaattttaaatttcgatttaacgttaacttgtaattcgttgctgctctcttttggctttggcgcaatcgctttaatatcgagccagaatacagattcacgatctgtgggcagcggagcgccggtatattgaatacgcagcgtgttggtctgctccggatcaagtctgaacagaggtggtgtgacaataaatggcgcagcgttatttttatcctgcccatcaccttcaacccacgactgaataagatagggaaccgcactttccatattagaaacagaaaatgccacctccttgctgtgttgtgggtatacgatccgtgttccccccattacaacgccagcggaaactgacgcagaactaaccattaatgcagtgagcataatatacgataaacgtttcatcattattatctctggaggtggctgagagtgaaatcagttataaaccatcaggaagttggaaacggcattgacgtcgcccgcgttaatttccgaaccgtctttgtcgagagaggcataaaacgttaattcagcattgccttcagcatccggtgcggttgtttcagataccgtacccggtttaatcgcggtgctgcgatcgctgttataaagcttcacgccgacgcccgtcgccataccttcgcctggcgtaacctgtagcagtgtgtcattcaccgtatctttggttccgtcaaacagtaccgcaaccgattcaaccgtctccgggcagttctctacgttgattttgaactcacgcggcgtcgtttcgctgtgatcgtcgaagtagcttttcgcccacgcgccgaggtctaccgttttgctttttgacgcaggggtaatatcacaggaaataagggtgattttcccggtaaagttgatcacgccgcctgtgctctgcgagccagcgcctgtatccagggaagcattaacaccagaatcactgcttgccagtactgattgagaagataacagcagccccgccgcggcaatcgccagcgccacatttttgattttcatttggaacactttcccctctgtaaattaaacagatatagacttgttgtaccaggtacaataaccgctataaggatttaaaaacgccaccaaaagggttttagcagaatgggtgacgcgaccttatagaataaagcagggtccatcccatggtgataatccgtatattttcagaaggccatacacagatatcctgcaactgaggaaatgacttctggccgaaaataacactgaatacgttgtggttagtaataaatttaatatcttctgtaacgttgcttctgaataaatagtaaatcatatgccttttaacgtctacgtattgaaaagcagtacgccgcgtctgtaaacactctataattaacactcagctaacaaatttaacccctttcgattgccctgataattattaatttgcttttaataccgtaactaaattacaagagagccaactgatcattgtttgatcaatttatttcagaatattattagccaaaaaatgtcacttcagcaaaaaattcttgccctttatcctgaaaaatcacggttaaacaggatatttctttatcgatcagcaattgatcgtttgtaatacactgttaaaatctatatgtgaaatttaccttaattaaaattttttgctacagcttagatttcgcatttttaaccaaaaaaaattttatttataggaaataaatcactctgctcacatatatacagcttttcaaaaacacaaataaagcaaataaacctcattcaattcacgtaatattatcacctccccattttattcaacatcttttacgcgtcgtatctgctcaaaaacgaatgtaatgctctccacctgactaccgctcccatcgcacacggtgagttaattttgcgggtttggtcctaccaataatgcgcaaagctatccatcgttcacagttttgatgctccacttcacaaaaccattgccgaatagcaacacttggttaaccatttattgccattaaccctacatcacaatattggatggaccacttttacactaagtgtgacgctgagatgagcagagactcacccgacgaacacctgtgtggtcctcaggagacctgcatgagcctctggcaacaaaactacgatccggccgggaatatctggctgtcgagcctgatcgcatcgctaccgatcctgttcttcttctttgcgctaattaagctcaagctgaagggctaccttgccgcaacgtacaccgttgccatcgccctgctggtggcgctgttcttctataaaatgccggtcgatcgcgcgctggcctccgtggtgtatggtttcttctacggcctgtggccgattgcgtggatcatcatcgccgccgtctttgtctacaaaatctcggtcaaaaccgggcagttcgatattattcgctcgtcgattctctctattacaccggaccagcgtttacagatgctgattgtcggtttctccttcggggcgttccttgaaggggcggcaggatttggcgcgccggtggcgatcaccgccgctctgctggtcgggctgggctttaacccgctgtatgccgctggcctgtgcctgattgtgaacaccgccccggtggcgtttggcgcgatgggcattccgattctggtggcgggccaggtgaccgggctggacagcttcgagatcggccagatggtgggtcgccagctgccgttcctgaccattatcgtgctgttctggatcatggcgattatggacggctggcgcggcgtgaaggagacctggcctgcggtgatggtagcgggcggttcgttcgccattgcccagtatctcagctccaacttcctcggcccggaactgccggacatcatctcttccctggtgtcgctggtctgcctgacgctgttcctgaaacgctggcagccggtacgtatcttccgctttgctgacatgggcgcatcgcacgtggatcagacgctggcgcgcaccggctataccgccggacagattgtgcgcgcatggtcaccgttcctgttcctgaccgccaccgtgacgctgtggagcattccgccttttaaagccctgttcgccccgggcggcgcgctgtacgacatggtgattaatatctccgtgccgttcctcgacaaaatggtcgcccgtatgccgccggtggtgcacgacgccacgccatatgcggcagtgtttaagttcgactggttttcagccaccggcacggccatcctgtttgccgctatcctttccgtagtgtggctgcgcatgaagcctgccgccgcggtgcagacctttgcggcgacgattaaagagctgatgctgccgatttactccatcggcatggtgctggcgttcgcgtttatttcgaactactccggcctgtcgtcgacgctggcgttagcgctggcgcataccggccacgcgtttaccttcttctcgccgttcctcggctggctgggggtgttcctgaccggttcagatacgtcatctaacgccctgtttgccgcccttcaggccacggctgcgcagcagattggcgtctcggacgtgctgctggtcgccgcgaacaccaccggcggcgtgaccgggaagatgatctcgccgcagtccatcgccattgcctgtgccgcggtggggctggtaggcaaagagtcggacctgttccgctttaccgttaaacacagcctgatatttacctgcatggtgggcgtgatcaccacattgcaggcctatgtcttaacctggatgattccatgatagtgatgcccagacgcctgtccgacgagattgccactcgcgtacgggcgctgatagaagaacaacagctggaagcgggcatgagattgcccgccgagcgtcagcttgccgctcagcttggcgtgtcgcgcaactcactgcgcgaggcgctggcgacgctggttagtgaaggggtgctgctgagccgtcgcggcggcggcaccttcgtgcgctggcagcatgacgactggtccgaacaaaacatcgtgcagccgctgaagacgctgatggaaaacgacccggactacagcttcgacatcctcgaagcgcgtcacgccatcgaaaccagtacagcgtggcacgcggcgatgcgggcaaccgacgccgacaaagagaagctcaaagcctgttttgaggccacgcaaagcagcgacccggacatcgcctcccaggcggacgtgcggttccatctggcgattgccgaggcctcgcacaacgtggtactgctgcaaaccatgcgcgggttcttcgacctgctgcaatcctccgtaaagcagagccgccagcgcatgtatctggtcccgccggtgtttgctcagctgaccgaacagcacgaggcggtgctcaacgccattctggccggtgatgccgaggccgcgcgcaaggcgatgatggcgcatctcggcttcgtgcataccaccattaaacgattcgatgaagatcaggcccgacaggcgcgtattacccgtctgcctggcgagagtgatatttccagggagaacaaagcatgattatttcagcagccagtgattatcgcgccgcggcgcagcgcattttgcccccgttcctgttccactacattgacggcggggcgtatgccgaatacaccctgcgccgcaacgtggaagacctgtcggaggtggccctgcgccagcgcgtgctgaagaatatgtctgacctgagccttgagacgaagctgtttaacgaaacgctctccatgccggtagcgctcgcacctgtcggtttatgcggcatgtatgcccgtcgcggtgaagtgcaggccgccgccgccgcagatgccaaaggcattccgtttaccctttccaccgtgtccgtctgcccgattgaagaagtcgccccgaccatcaagcgcccgatgtggttccagctgtacgtcctgcgcgatcgcggttttatgcgcaacgcactggagcgcgccaaagcggcgggctgctcaacgctggtctttaccgtcgacatgccgacccccggcgcgcgctaccgcgacgcccactccggcatgagcggccctaacgcggccctgcgccgttactggcaggcggtgacgcacccgcagtgggcgtgggatgtgggcgtgaacggccgtccgcacgatctgggcaatatttcggcctacctgggtaaaccgaccgggctggaagattacatcggctggctggcgaacaatttcgatccgtcgatctcatggaaagacctggagtggatccgcgaattctgggacggcccgatggtgatcaaagggatcctcgacccggaagatgcccgcgacgcggtacgttttggcgccgatgggatcgtggtctctaaccatggtggccgccagcttgacggggtgctctcctccgcccgcgccctgccggccattgccgatgcggtgaaaggcgatattgcgatcctggccgacagcggcatccgtaacgggctggacgtggtgcgcatgatcgccctgggcgcggacagcgtgctgctgggccgtgcttacctgtacgcgctggccaccagcggccaggcgggcgtggcgaatctgctgaacctgatcgagaaagagatgaaggtggcgatgacgctgaccggtgcgaaaacaatcggtgaaatcagcaaagactctctggtgcaggagctcagtaagctgcctgcggcgctggcccctctttctcagggaaacgcggcctgatctcccccggttagcctccccttcttccgcgcccgacttccccctcgggcgctttttttgtcgaaaataacacctacttaacattctggataagaaaatttgacatccacctgccgtccgcaattgtatagacaagcaaatacaagaacacaaaaacaacatcagatcggagtggagcgtatggcgtattcaggtaaggtggatattcagcaggtgatcgatgaaagtcctttttcagggtttcactggcttctaattgtgctgggctttctggtgctggcgattgatgggtttgataccgcagcgatgggttacattgcgcctacgctgtcgacggagtggggaatacataaacaggatctggggccggtgctgagtgcggcgctgctggggctgtcgctgggagccctgattgcaggtccggtatcggaccggatgggacgcaagcgcgtactggtcttttcatgcctgttcttcggcctggcgagcctgggcacggcctgggcgcaaagtctgaataccctgacgctgtggcgctttctgacgggcctgggcctcggcgctgccatgcctaacgccatcacgctgatctccgagtttgccccccagcgctgccgcgccatggtaattaacaccatgtactgcggctttccgctgggtgcggcgggcggcggggcgatctcgtcctggcttatccctcaccacggctggcgaagcgtgctgctgaccggcgcgattgcgccgctgattttaacggtgctgctggcgctgctgttgccggagtcggtgaagtttctggtgcagcgcgggaaagacgtcgcccaggttcgccgcatcgccagccggttcgcccgcagcacgctggatagcgtcacgggctttttcctcgcggaggagaaagtcgcgtcgaaaaaaggcagcgtgtcgcagctgttttccatgccctggctgcccggcaccctgatgctgtgggtcacctattttatggggctggtgatttattacgtcctgctgagctggatgccaacgctgatgcaggggatggggtatgcgctggcggagtccgcctggctcacctcgctgttcaccttcggcggcaccgctggcattttgctcgcgggctggatgatggatcgctgggaagcgcacaaggtggtcgcgtgtggtttcgtgctgacgatgggcctgattcttttactcggcattgagcataaccatatcgccctgtttggcgggttaattttcctgatggggatcgcgatgaacggcgcgcagtcgggcatgcagaccctggccgccaccttttaccctaccgagtgccgagcgacgggtatcgcctggatgcaggggatcggccgcttcggcggcgtggcgggcaccatgactagcgcccagcttctttccatgcagtggcaggcggacagtattttaatgatcctcagcgtacctgctctcgtggctgcggcggcaaccgtctacaaaatgctgtatagccgcgcgcaggagccgggcgtcgcctagtccctctcttttctgctattctgcccccgcaattaagggggcagcatgcttaacatcgtcttattcgaaccagaaattccgccgaacaccggcaatattatccgcctgtgcgccaacaccggttttcgtctgcacattattgagccgatgggctttacgtgggacgacaaacgtctgcgccgcgcggggctggactaccatgagtttaccgccgtcgttcgtcatcacgattacgccgcgtttctgggatccgaaaaaccacagcgcatgttcgccctgaccaccaaaggtacgccagcgcacagcgccgtaagctatcaggacggggattatctgatgtttggtccggaaacccgcggcctgccggccaccattctggatgccctgcccgctgagcagaaaattcgtattccgatgatgccggacagccgcagcatgaacctgtcgaatgcggtgtcggtggtggtgtatgaggcgtggcgccagctgggttatcccggcgcgatattgcgtagctaaaacagttcgggtggcttacgccacccgattcgtcgtgtttagcctgctaccgcgatacgtttcatatcggtcatgtagccacgcagtttctggcccactttctcgatttcgtggctgcgaatcgcttcgttgacgtcacgcagctgcgcgttatcaaccgctccttccgcaatcgcctggcccagatcgcccgcttgcagggtggtcatgaactctttcagcagcggtacgcaggcgtaagagaacaggtagttaccgtactcggcagtatcggagatcaccacgttcatctcatacagacgtttacgagcgatggtgtttgcgatcagcggcagctcgtgcagcgattcgtagtacgcagattcttcaatgatgcccgaatccaccatggtttcgaacgccagctcaacgcccgctttcaccatcgcgatcatcaggacgcctttatcgaagtactcctgctcggtgatcttgccgtcatactgtggtgcggtttcgaacgcggttttaccggtctcttcgcgccaggtcagcagtttcttatcgtcattcgcccagtccgccatcatgccggaagagaactcgccggagataatgtcgtccatatgtttctggaacagcggcgccatgatggttttcagctgttcagagagtgcgaacgcgcgcagttttgccgggttggacagtcggtccatcatcagcgtaatgccgccctgcttcagcgcttcggtgatggtttcccagccgaactgaatcagtttttccgcgtatgccggatcggtgccttcttccaccagcttgtcgaagcacagcagagagccggcctggagcatgccgcacaggatggtctgctcgcccatcaggtcagatttcacttccgcaacgaaggaagattccagcacgcccgcacgatggccgccagtggccgcagcccaggctttggcaatcgccatgccttcgcctttcggatcgttttccgggtgaacggcgatcagcgtcggtacgccgaagccacgtttgtactcttcgcgcacttcggtgcccgggcacttcggtgccaccatcaccacggtgatgtctttacggatctgctcgcccacttcaacgatgttgaagccgtgggagtaacccagcgcggcgccgtctttcatcagcggctgtacggaacgcacaacgtcagagtgctgcttgtccggcgtcaggttaaccaccagatccgcctgcgggatcagctcttcgtaggtgcccactttgaagccgttttcggtcgctttacgccaggaagcacgcttttcggcaatcgcttctttacgcagggcgtaggagatatccagcccggagtcacgcatgttcaggccctggttcagaccctgtgcgccacagccgacaatgaccacttttttaccctgaaggtagctcgcgccatcagcaaattcatcgcgcgccatgaagcggcatttgcccagctgcgccagctgctggcgcaagttcagtgtattaaagtagttagccatgggtgatacctcgtgatgttgtgtgtcttattgttcggttcgcgtttcagcgagaatgtacccacattacaacaggaaatttattgcggaaattgatatattcacaacgtcacattgcaatttatgcaatgtaaaaagagggagtggaatcggtggatttacgcgatctgaaaatgttcctgcacctggcggaaagccgtcactttggccgtagcgcccgggcgatgcacgtcagcccctccacgctgtcgcgccagatccagcgccttgaggaagacctcggccagccgctgttcgtgcgcgataaccgcaccgtcaccctcacggaagcaggtgaagagctgcgcatctttgctcagcagacgttattacagtatcagcagctgcggcacaccatcgaccagcaagggccgtcgctttccggcgagctgcatattttctgttccgtgactgctgcctacagccatcttccccccattctcgaccgcttccgcgcggaacatccgtcggttgaaattaagctcaccaccggcgatgccgccgacgcgatggaaaaagtggtgacgggcgaagcggatctggcgattgccggaaaacctgaaacgctgccgggggcggtggcgttctcgatgctggagaatttggcggtagtgctgattgccccggcgctgccctgcccggtgcgcaaccaggtttcggtggagaaaccggactggtccacggtgccgtttatcatggccgatcaggggccggtgcgccgccgcattgagctgtggttccgccgccagaagatcagtaacccgtcgatttacgccacggtcggcggccatgaggcgatggtatcgatggtggcgctcggctgcggcgtagcgctgctaccggaagtggtgctggaaaacagcccggagccggtgcgcaatcgcgtgatgattttagaacgcagcgacgagaaaacgccgttcgagctaggcgtgtgcgcacaaaaaaagcggctgcatgagccgcttattgatgcgttctggacgatattgccgaatcattaaagccgggtggcgctgcgcttacccggcctacacgcagttcaatccttagaacgtaggcctgataagcgcagcgccatcaggcattttcccgaacaacctaacccgccaggaagaaacggaacgccgggttgtgggtttcgtcatggcactcatagcccagctcgttcaggcgcgtttcgaaatccggctcgtgctcgcccagctcgaacgccgccagtacgcggccatagtcggtgccgtggctgcggtagtggaacagagagatgttccagtgcgtgcccaacgtgtgcaggaacttgagcagcgcgcccggcgattccgggaactcgaagctgaacaggcgttccttcagcggcttggatggacggccgccgaccatgtaacgcacgtgcagcttcgccatctcgtcgtcggagagatcgaccacgctgtaaccgccgtcatgcagcaggctgaggatctctttgcgctcctccacgccacggctcagacgcacgccgacaaaaatgcacgcatctttggcatcggcaaagcggtagttgaactccgttaccgaacgaccgcccagcagctgacagaacttcaggaagctgcccttctcttccggaatggtcaccgccagcagcgcttcacgctgctcacccagctcacagcgctcggaaacgtagcgcagaccgtggaagttcacgttggcaccggaaagcacgtgcgccagacgctcgccgcgaatattgtgctgggcgatgtattttttcattcccgccagcgccagcgcgccggatggttccgccaccgcacgcacatcctcgaagagatctttcatcgccgcgcagatagcgtcgctgtcgacggtgacgatatcgtcgagatactcctggcacaggcggaacgtttcgtcgccaatgcgcttcaccgccacaccttcggcgaacagcccgacgcgcggcagatctaccggatgtccggcgtccagcgccgccttcaggcaggcagagtcttccgcttcaaccgcaatcactttgatctgcggcatcagctgtttgatcagcaccgccacacctgcggctaagccaccgccgcccaccgggacgaaaacgcggtcgagatgggcgtcctgctgcaacagttccagcgccagcgtaccctgcccggcaatcaccatcgggtgatcgaacggcggcacccaggtgaagccctgctgctgcgccagctcaatcgctttggctttggcttcgtcaaagttagcgccgtgaagcagcacttctccgccgaacccgcgcaccgcgtcaaccttgatatctgcggtggcgaccggcatcacgatcagcgccttcagccccagacgcgccgaggagaacgccacgccctgcgcgtgattgcccgccgaggcggtaatcaccccgcgcgctttctgctcgtccgtcagcccggccatcatcgcgtaggcgccgcgcagcttgaagctgtgcaccggctgcctgtcttcacgcttcaccagaatgacgttgtcgagacgcgaagaaagtttgtccattttttgcaggggcgtgacctgcaccgcttcatagaccggcgcgcgtagcaccgctctcagatattccgccccctccggggcggcggataagggttgtgactcggccatcattagcccccaagtttagatttatcgcgcaccgcgcctttatctgcactggtggcaaggctcgcgtaagcgcgcagggcgaaggagacttcacgctgacgatctttcggcgtccaggctttgtcgccgcgggcttcctgcgcttcacgacgggccgcaatctcctggtcactcagcttcagctgaatgccgcggttcggaatgtcgatttcgatcaggtcgccatcttcgatgatcgcgatattgccgccgcttgccgcttctggcgagacgtggccaatggagaggcctgacgtgccgccagagaaacgaccatcggtgatcagcgcgcaggctttgccgaggcccatcgatttcaggaaggtggtcgggtagagcatctcctgcatgcccggaccgcctttcggcccttcgtagcgaatgaccaccacgtcgccttccaccactttgccgccgaggatagcgtctaccgcttcgtcctggctttcatacacttttgccgggccggtaaatttcaggatgctgtcgtccacgcctgcggttttcacaatgcagccattttccgcgaagttaccgtacagcacggccagaccgccgtctttgctgtaggcatgttccagcgagcgaatgcagccttcggcgcgatcgtcatccagcgtgtcccagcggcaatcctgcgagaacgcctgggtggtacggatgcccgccggaccggcgcgatacatgtttttcaccgcgtcgtctttggtcagcatcacgtcgtactgctccagcgactccggcagcgtcaggccgagcacgtttttcacgtcgcggttcagcagcccggcgcgatccagctcgccgagaataccaatcacgccacccgcacggtggacatcttccatgtggtacttctgggtactcggcgcgactttacacagctgcggcactttgcgggagagcttgtcgatgtcgctcatggtgaagtcgatttcagcttcctgcgcggcggccagcaggtgcagaacggtgttggtggaaccgcccatggcgatatccagcgtcatggcgttttcgaacgccgctttgctggcgatgttacgcggcagcgcgctggcgtcgtcctgctcgtagtagcgtttggtcagctcaacgatgcgcttgcccgcgttaaggaacagctgcttacggtcggcgtgggtcgccagcagcgagccgttgcccggctgagacaggcccagcgcttcggtcaggcagttcatggagttggcggtgaacatcccggaacaggagccgcaggtcgggcacgcggagcgttccacctggtcgctctgctcgtcagagactttcgggtccgcgccctggatcatcgcatcgaccaggtcgagcttgatgattttgtcggagagcttggttttccccgcttccattgggccaccggagacgaagatcaccgggatgttcaggcgcagggaagccatcagcatccccggggtgattttgtcgcagttggagatacagaccatcgcatcggcgcagtgggcattaaccatgtactccaccgagtcggcgatcagctcgcgcgacggcagtgaatagagcattcccccgtggcccattgcgataccgtcatccaccgcaatggtgttgaactctttcgccacgccgccggaggcttcgatttgctcggcaaccagcttgccgagatcgcgcaggtgcacgtggcccggtacaaactgggtgaaggagttcaccacggcgataattggcttgccgaaatcggcgtcggtcattccggtggcgcgccacagtgcgcgggcacccgccatattacggccgtgggtggtggtggctgaacgatacttaggcatgctttatttactcccgtctgactatttaatgggacggtgcgtgccgtcccaaatttatatttagtgattaacctgatccaaccagccgtatttgtcttctgtttcgccggtgaacaggccgaagaaggcttgctgaatgcgtttggtgaccgagccacagcggccttcgcccacctgaatgccatcgacgctacgcaccggcgtaatttcagccgcggtaccggacatgaacacttcgtcagccaggtacagggattcgcgggacagtacctgctcgcgcacttcgatacccagatcttttgccagcttgatgatggcgtcgcgggtgatgcccggcagcgcggacgaagtgaatggcggggtgaacagaatgccgtctttcacttcaaacaggttttcacccgcgccttcggagatgtagccattcacatccagcgcgataccttcctgatagccgtgacggcgcgcttcgctgccgaccagcagtgaggaaaggtagttaccgcccgctttagccgcagtcgggatagtgtttggcgccacgcggttccaggaagaaaccattgcgtcgatcccctgatccagcgcttccgcgcccaggtaggcgccccacgggaacgcggcaatgatcacatcggtgttatagccagcgggcgggttgacgcccatgccgacatcacccacgaagaccagcggacgaatataggcgctggtcagtttgttctggcgaatcacctcgcggcaggcttccatcagctcatcaacgctttgggagaccgggaaacgataaattttggctgagtcatgcagacgctgcatgtgttcgcgatggcggaacaccactggccctttgtgagagtcgtagcaacggatcccttcaaacacggaggtgccgtagtgcagcgcgtgggacatcacgtgaactttcgcgtcttcccagcgaaccatctcaccattgaaccaaatgtaatcagctttttttgtcgtcattttttcgtcctgtcacgcttaagcgcggatttgttgtgatgtggttgtgctctggcagatggcaacatgggcaacgtctaccagttttgataactgactaaacagtaagtcgaccggccgcgggctggcaacggttaattcgatactgatgttctgcgcgtcggtggccgtttccatattcatagagcaaatctgaaagccacggtggcgaaccacgcgcaatacgcgttctaaagtttccgggttgaagcgagcctgcacggcgacctgatgttgcatcatgataatttctccagcatttgtgagttactggcaccgggcggtaccaacggccagacgttctcaagctcgtcgattgagacatgaagcaggtatggcccttcgcttgacagcatggtgtcgagtgccgcttcaacctggtctttacgggtgatgtgctggccaggaatgccgaaggcgctggccagggtgaggaaatcggggttatcggtcagggtcgtttcgctgtaacgctcctggaagaacagctgctgccactggcgaaccatgcctaaacgctggttatcgagcaagacgatcttcagcggtaactgcttacgcttcacggtgccgagctcctggacgttcatcatgaaggagccgtcaccggagatacagataacggtatcgttcgggcgggcaacctgcgcgccaacggctgctggcagaccgaagcccatcgtgcctaagccgctcgaggtgataaagttctccgggcgggtgtaggtcatgtgctgggctgaccacatctgatgctggccgacatccgtcgttaccacgctgtctgcgggtttacggtctgacagctgtttcaacagcagcggcgcatagatggcgtcgcctgggtgatcgtaacgccacgcgtgttcagtacgcatatcagcggtgtgctgacgccatgggttgatatccagcggctgctccagcgccggtaacagcgcgttaagatcgccctgcaacgcgacatgcgcctgacgcagtttgttcatctccgccgggtcgatgtccatatggatcactttggcgttcggcgcgaaggtattcagcttgccggtaacgcggtcgtcaaaacgggcgccgacggcgataagcaagtcgcattcctgcaccgccaggtttgccgctttggtaccatgcatccccagcatgccgaggtagtacgggtaatctgcctctaccgcaccgagacctttcagcgtgcaggtggcgggcatttgcgtggtcgcaatgaacgcgcgaagcgccggaacagcctgcgccatgcccacgccgccgcctacgtacagcatcggttgtttggcctgcgccatcatctgacgcgcctcttccacctctgcatgcgggaacgcattatcgctttccacggtagagaaatgcggctccagatcgccgagtgcaacctggatatctttcgggatatcaaccagaaccgggccaggacggccagagctggcaacctcgaacgcttcggccatcacacgcggcagctcttcgagagactgaacgaggaagctgtgtttggtgcaggccagcgataaaccgagcacatccacttcctggaaggcatcggtgccgatgaacggagaggccacctggccggtgatcgccaccacgggtacggagtcgagcagcgcgtcagccaggccggtgatcaggttcgttgcgccgggacctgaggtggccatacagacgccggttttaccggtcgcacgggcataaccgatggcggccatcgctgcgccctgctcgtgtcggcacaacaggtgttccacgccgccgtcatacagtgcatcgtaaatcggcataattgcgccacccggataaccgaatacggtttcgactccctgcgcgcgcaacgcatgtactacccattgtgccccattcatagttagttccccgtcataaatctggagaaacagaattttgtgctagtcgtcattctctgctcctcatttaagttttttagtcataaaaaaacccccggacctttcggtgcgggggtcttagttcgttaaggcttgatttctaatcctttcctcgtccaagtgcagccccgcacggtgggataataatcaccaccacgctaatcacgaccaggctaatcactcgtagaagggctgtcattttcagttctttttgcatcttgttcgaaggaatacctaaagagttaccacagatatttcatctgacacaagatttttttatgacctatatctgtagcatgcgaactatttctttcaaaatcgttgttttatatagggaaaaaatagaaatgaagatttttcatttttttgtcctgcttcatccggcaaggcgcgcatgatttcttttctgcgaggccgattccaccgacatgtaaggattacattttgccgctaaaaggctggaacgagcgccgtaattaagtgaattagtgctaaacaggaaaaaatgatgctggcatagtcaccgccaaggagggcttatgtcactgtcagttgtttatacacgcgcggccatcggcgtgaaggcaccgcttatttctgtagaggttcatttaagtaatggactgcccggactgacgctggtcggcttaccagaaacgaccgttaaagaggcgagggatcgcgtgcgcagcgcaattattaatagcggttatgcttttccggcgaagaagatcaccattaaccttgcgcctgccgatttgccaaaggagggagggcgatatgatttacctattgctatagcgcttctcgcggcttctgaacagctcaatacgccagggctaagctcgtgtgagttcgtgggtgaattagcgcttacaggcgcgttaagaggcgttcccggagcaatctcgggtgcgcttgaagccatacgcgcgggaagacaaatcattgtggccaatgaaaatgcctctgaagtaagccttatcgccgaaaaggggtgtcttgtcgcaggacatttgcaagaggtttgcgcctggctggaaggccgacacgagcttgccgagccgcaggagaatgacgaggtggcgccagcttcgcccgaagatctcagcgatattatgggtcaggaacagggtaagcgggcgttagagataacggccgcgggtgggcataacctgttactgataggtccgccaggcacggggaaaacgatgctggcgagcagattgagcggcctgttgccacccctcaataatcatgaagcgctggaaagcgccgcgatatttagcctggtcagttctacgtcgctgcataaacagtggcgccgccgtcctttccgctctccacaccacagtgcgtctcttaccgcgatggtgggcgggggttcgatccccggaccgggtgaaatctcactggcgcacaacggcattttgtttctggatgaattgccagagtttgaacgccgcgtgctggatgcattgcgggagccgattgaatccggcgaaatccatttgtctcgtacacgggccaaaataagctaccctgcgcagtttcagctagtcgcggcgatgaaccctagccctacgggtcattatcagggcaatcataaccgctgtacgccggagcagacgctgcgctatctgagtaagctgtctggcccctttctcgaccgttttgatttatctctcgagatccccctgcccccgcccggtctgctgaggcaaaccggtattaggggcgaaagctcagcaactgtgcgtgaacgggttattgcggcgcaggcgcggcagtatgctcgtcagaacaggctgaatgcccggctggataacagcgggatccgacagttttgttctctcaacgctgaagatgcaggctggctggaagagacactgacgcggtttgggctatccattcgcgcgtggcagcgtttgttgaaagtagcgcgcacggtcgccgacgtggagggctgctccggaatagagaggcggcatttgcaggaggcattaagttaccgtgcgatcgatcggctgctgttgcatctgcaaaaaatgctggcgtaaaaaaaggggccgtagccccttctcttcttaatcgtcagactcggtgtagtcttctgcaccttccatctgcggcttgccgccagacagcgtatggaaacgcttaggacgcttaatgcgagccatatacttgatccatacacgttctgcatcagactgcggctcacgctcaccacggcaaacagagacaaactgtttttcatcttcggttgccggttcacgtttacccagatccagctcgttaaaggcataaccatggcgctcaagaagttgagcttctttgatagtgaaatcgccgtgacgagagaacccgcgcgggtaatgtttattgtcgaaaaaacgattagtcgtcgtaaagctttccgccatcctacacgctcctaattctttggccgagctatttatggcgcggagtattagttacgcttgacagagtgtaaaacaaaacatttaaatcataacgacaaataattttgtggagaaagatgtggatacggaattgctaaaaactttcctcgaagtgagcagaacgcgacactttgggcgagcagctgaagccctctacctgacgcagtcagcagtcagttttcgtattcgacagctggaaaatcaactgggtgtgaacctttttacccgccatcgcaacaatattcgtttaacaccggccggtgaaaagctgttgccttatgcagaaaccctgatgaatacctggcaggcagcgcgaaaggaggttgcgcacacctcccggcataatgaattctcgatcggtgccagcgcatcgctatgggaatgcatgctcagccaatggcttatgcggctatatcgcacacacaaccatctgcaatttgaggcgaggattgcgcaacgtcagtcgctggttaagcaactccacgagcggcagcttgatctgctgatcaccacagaagcccccaagatggacgaatttagcagccagattgttggacagtttagcctggcgctctatgcatcggagcctgcaatgatgaaggccgacctgaattatttacgcctggaatgggggcctgattttcagcaacacgagacggggttaattgccagcgatgatatcccgcagctcacgacaagctcagcggagatcgcatgccagcatcttcccgcattgaaaggctgtacctggttacctgttcgctgggcggataataaacctacactccatgttgtcaccgattcgacaacgctctccagaccgctgtatgccatttggctgcaaaacagcgataagcagtcgcagataaaagatctgttaaaaaccagcatactggattaacgcaaaagcctgcggaaacgcaggctgcttattcttcaggaaggtgttgagctactttgcaggcaaaaaaaaatcctttgccgaagcaaaggattctatatggcaggggcggagagactcgaactcgcgacacccggttttggagaccggtgctctaccaactgagctacgcccctaaagtttttgccattaagcctgccggaagggcaggcttaatgtcttaataagtggcggaacggacgggactcgaacccgcgaccccctgcgtgacaggcaggtattctaaccgactgaactaccgctccaccgaatacttctgtaaccaccggattaatgcaccggcttacttcttaatttgatgcctggcagttccctactctcacatggggagaccccacactaccatcggcgctacggcgtttcacttctgagttcggcatggggtcaggtgggaccaccgcgctaaagccgccaggcaaattctgttaatctgtatcaggctgaaaatatcg
